(19) United States
(12) Patent Application Publication
(10) Pub. No.: US 2023/0103771 A1
(43) Pub. Date: Apr. 6, 2023

(54) CRISPR-Cas13 crRNA Arrays

(71) Applicant: University of Rochester, Rochester, NY (US)

(72) Inventor: Douglas Matthew Anderson, Pittsford, NY (US)

(21) Appl. No.: 17/907,156

(22) PCT Filed: Mar. 26, 2021
(86) PCT No.: PCT/US21/24406

§ 371 Date: Sep. 23, 2022

Related U.S. Application Data
(60) Provisional application No. 63/000,757, filed on Mar. 27, 2020.

(51) Int. Cl. A61K 38/46; C12N 15/11; C12N 9/22; C12N 15/86; A61K 31/7088; A61P 31/14

(52) U.S. Cl. CPC A61K 38/465; C12N 15/11; C12N 9/22; C12N 15/86; A61K 31/7088; A61P 31/14; C12N 2310/20; C12N 2800/80; C12N 2740/15042; C12N 2740/15022; C12N 2740/15052

(57) ABSTRACT

The disclosure provides tandem arrays of CRISPR RNAs and methods of use.

### CROSS-REFERENCE TO RELATED APPLICATIONS

[0001] The present application claims priority to U.S. Provisional Application Ser. No. 63/000,757, filed on Mar. 27, 2020, which is incorporated by reference herein in its entirety.

### BACKGROUND

[0002] Mammalian guide-RNA expression cassettes are generally created by cloning annealed oligonucleotides comprising the guide sequence into a cassette comprised of a mammalian Pol III promoter, a Direct Repeat and a terminator of 6 or more Ts. Commonly, multiple guide-RNAs are expressed by adding addition Pol III promoter cassettes, however this can significantly increase the complexity and size of the vector. Generation of tandem crRNA arrays would significantly decrease the size requirements of the vector; however, nucleotide synthesis of long arrays is prohibited due to size and the repeat nature of DR sequences.

### SUMMARY OF THE INVENTION

[0003] In one embodiment, the disclosure provides a tandem array comprising at least two CRISPR RNA (crRNA), wherein each crRNA comprises a guide sequence and a direct repeat (DR) sequence.

[0004] In one embodiment, each guide sequence in the tandem array is different. In one embodiment, each DR sequence in the tandem array is different. In one embodiment, each DR sequence comprises a nucleotide mutation within the loop region of the DR sequence.

[0005] In one embodiment, each DR sequence comprises a T17 or T18 nucleotide mutation. In one embodiment, each crRNA comprises a DR sequence independently selected from SEQ ID NOs: 265-274. In one embodiment, each DR sequence is 3′ from the guide sequence.

[0006] In one embodiment, each guide sequence is independently substantially complementary to a Coronavirus genomic mRNA sequence or a Coronavirus subgenomic mRNA sequence. In one embodiment, each guide sequence is substantially complementary to a Coronavirus leader sequence, Coronavirus S sequence, Coronavirus E sequence, Coronavirus M sequence, N sequence, or Coronavirus S2M sequence. In one embodiment, each guide sequence is independently substantially complementary to a sequence at least 80% homologous to a sequence selected from SEQ ID NOs: 168-174, 176-181, 186, and 187. In one embodiment, each guide sequence comprises a sequence at least 80% homologous to a sequence selected from SEQ ID NOs: 189-224. In one embodiment, the tandem array comprises a sequence at least 80% homologous to SEQ ID NO:275.

[0007] In one embodiment, each guide sequence is independently substantially complementary to an influenza virus genomic RNA sequence or an influenza virus subgenomic RNA sequence. In one embodiment, each guide sequence is substantially complementary to an influenza virus PB2 sequence, influenza virus PB1 sequence, influenza virus PA sequence, influenza virus NP sequence, or influenza virus M sequence. In one embodiment, each guide sequence is independently substantially complementary to a sequence at least 80% homologous to a sequence selected from SEQ ID NOs: 225-244. In one embodiment, each guide sequence comprises a sequence at least 80% homologous to a sequence selected from SEQ ID NOs: 245-249. In one embodiment, the tandem array comprises a sequence at least 80% homologous to a sequence selected from SEQ ID NO:276-279.

[0008] In one embodiment, the disclosure provides a composition comprising a tandem array of the disclosure. In one embodiment, the composition further comprises a Cas protein. In one embodiment, the Cas protein is Cas13. In one embodiment, the Cas protein comprises a sequence at least 80% identical to a sequence selected from SEQ ID NOs:1-47. In one embodiment, the Cas protein further comprises a localization signal or export signal. In one embodiment, the Cas protein comprises an NES, wherein the NES comprises a sequence at least 80% identical to SEQ ID NO:58-59. In one embodiment, the Cas protein comprises a nuclear localization signal (NLS), wherein the NLS comprises a sequence at least 80% identical to SEQ ID NO: 50-57 and 323-935. In one embodiment, the Cas protein comprises a localization signal, wherein the localization signal comprises a sequence at least 80% identical to SEQ ID NO: 60-66.

[0009] In one embodiment, the disclosure provides a method of generating a tandem array comprising at least two CRISPR RNA (crRNA), wherein each crRNA comprises a guide sequence and a direct repeat (DR) sequence. In one embodiment, the method comprises: ligating at least two the crRNA sequences, wherein each crRNA sequence comprises a unique DR sequence, wherein the ligation generates the tandem array.

[0010] In one embodiment, the disclosure provides a method of decreasing the number of two or more unique target RNA in a subject. In one embodiment, the method comprises administering to the subject a tandem array of the disclosure and a Cas protein or nucleic acid encoding a Cas protein; or administering a composition the disclosure. In one embodiment, the tandem array comprises at least two unique crRNA sequences which are substantially complementary to the target RNA sequences.

[0011] In one embodiment, the disclosure provides a method for treating a viral infection. In one embodiment, the method comprises administering to the subject: (a) tandem array comprising at least two CRISPR RNA (crRNA), wherein each crRNA comprises a guide sequence substantially complementary to a viral RNA sequence and a direct repeat (DR) sequence; and (b) a Cas protein or nucleic acid encoding the Cas protein.

[0012] In one embodiment, the Cas protein is Cas13. In one embodiment, the Cas protein comprises a sequence at least 80% identical to a sequence selected from SEQ ID NOs:1-47. In one embodiment, the Cas protein further comprises a localization signal or export signal. In one embodiment, the Cas protein comprises an NES, wherein the NES comprises a sequence at least 80% identical to SEQ ID NO:58-59. In one embodiment, the Cas protein comprises a nuclear localization signal (NLS), wherein the NLS comprises a sequence at least 80% identical to SEQ ID NO: 50-57 and 323-935. In one embodiment, the Cas protein comprises a localization signal, wherein the localization signal comprises a sequence at least 80% identical to SEQ ID NO: 60-66. In one embodiment, the Cas protein comprises a sequence at least 80% identical to SEQ ID NOs: 68-100.

[0013] In one embodiment, the nucleic acid encoding the Cas protein comprises a sequence at least 80% identical to SEQ ID NOs:132-133. In one embodiment, the nucleic acid encoding the Cas protein comprises a sequence at least 80% identical to SEQ ID NOs:147-166.

[0014] In one embodiment, the viral infection is a coronavirus infection and wherein each crRNA independently comprises a guide sequence substantially complementary to a Coronavirus genomic mRNA sequence or a Coronavirus subgenomic mRNA sequence.

[0015] In one embodiment, each crRNA independently comprises a guide sequence substantially complementary to a Coronavirus leader sequence, Coronavirus S sequence, Coronavirus E sequence, Coronavirus M sequence, N sequence, or Coronavirus S2M sequence. In one embodiment, each crRNA independently comprises a guide sequence substantially complementary to a sequence at least at least 80% homologous to a sequence selected from SEQ ID NOs: 168-174, 176-181, 186, and 187. In one embodiment, each crRNA independently comprises a guide sequence substantially at least 80% homologous to a sequence selected from SEQ ID NOs: 189-224. In one embodiment, the tandem array comprises a sequence at least 80% homologous to SEQ ID NO: 275.

[0016] In one embodiment, the viral infection is an influenza infection and wherein each crRNA independently comprises a guide sequence substantially complementary to an influenza virus genomic RNA sequence or an influenza virus subgenomic RNA sequence. In one embodiment, each crRNA independently comprises a guide sequence substantially complementary an influenza virus PB2 sequence, influenza virus PB1 sequence, influenza virus PA sequence, influenza virus NP sequence, or influenza virus M sequence. In one embodiment, each crRNA independently comprises a guide sequence substantially complementary to a sequence at least at least 80% homologous to a sequence selected from SEQ ID NOs:225-244. In one embodiment, each crRNA independently comprises a guide sequence substantially at least 80% homologous to a sequence selected from SEQ ID NOs: 245-264. In one embodiment, the tandem array comprises a sequence at least 80% homologous to a sequence selected from SEQ ID NO: 276-279.

[0017] In one embodiment, the disclosure provides a delivery system comprising: a packaging plasmid a transfer plasmid, and an envelope plasmid, wherein the packaging plasmid comprises a nucleic acid sequence encoding a gag-pol polyprotein; the transfer plasmid comprises a nucleic acid sequence encoding a tandem array comprising at least two CRISPR RNA (crRNA), wherein each crRNA comprises a guide sequence and a direct repeat (DR) sequence and a nucleic acid sequence encoding a Cas protein; and the envelope plasmid comprises a nucleic acid sequence encoding an envelope protein.

[0018] In one embodiment, the Cas protein comprises a sequence at least 80% identical to a sequence selected from SEQ ID NOs:1-47. In one embodiment, the Cas protein further comprises a localization signal or export signal. In one embodiment, the localization signal or export signal comprises a sequence 80% identical to a sequence selected from SEQ ID NOs:50-66 and 323-935. In one embodiment, the envelope protein is a coronavirus spike glycoprotein. In one embodiment, the envelope protein comprises a sequence at least 80% identical to a sequence selected from SEQ ID NO:101-129.

[0019] In one embodiment, each crRNA independently comprises a guide sequence substantially complementary to a Coronavirus genomic mRNA sequence or a Coronavirus subgenomic mRNA sequence. In one embodiment, each crRNA independently comprises a guide sequence substantially complementary to a Coronavirus leader sequence, Coronavirus S sequence, Coronavirus E sequence, Coronavirus M sequence, N sequence, or Coronavirus S2M sequence. In one embodiment, each crRNA independently comprises a guide sequence substantially complementary to a sequence at least at least 80% homologous to a sequence selected from SEQ ID NOs: 168-174, 176-181, 186, and 187. In one embodiment, crRNA independently comprises a guide sequence substantially at least 80% homologous to a sequence selected from SEQ ID NOs: 189-224. In one embodiment, the tandem array comprises a sequence at least 80% homologous to SEQ ID NO: 275.

[0020] In one embodiment, each crRNA independently comprises a guide sequence substantially complementary to an influenza virus genomic RNA sequence or an influenza virus subgenomic RNA sequence. In one embodiment, each crRNA independently comprises a guide sequence substantially complementary an influenza virus PB2 sequence, influenza virus PB1 sequence, influenza virus PA sequence, influenza virus NP sequence, or influenza virus M sequence. In one embodiment, each crRNA independently comprises a guide sequence substantially complementary to a sequence at least at least 80% homologous to a sequence selected from SEQ ID NOs:225-244. In one embodiment, each crRNA independently comprises a guide sequence substantially at least 80% homologous to a sequence selected from SEQ ID NOs: 245-264. In one embodiment, the tandem array comprises a sequence at least 80% homologous to a sequence selected from SEQ ID NO: 276-279.

### BRIEF DESCRIPTION OF THE DRAWINGS

[0021] The following detailed description of various embodiments of the invention will be better understood when read in conjunction with the appended drawings. For the purpose of illustrating the invention, there are shown in the drawing's illustrative embodiments. It should be understood, however, that the invention is not limited to the precise arrangements and instrumentalities of the embodiments shown in the drawings.

[0022] FIG. 1 depicts a schematic of the Coronavirus genomic and subgenomic mRNAs.

[0023] FIG. 2 depicts a schematic of the eraseR platform.

[0024] FIG. 3 depicts a schematic of delivery via pseudotyped integration-deficient lentiviral vectors.

[0025] FIG. 4, comprising FIG. 4A through FIG. 4C, depicts a schematic of guide-RNA testing, lentiviral production and cellular targeting. FIG. 4A depicts a schematic of the design of luciferase report construct encoding 5′ and 3′ CoV target sequences. FIG. 4B depict a schematic demonstrating the lentiviral constructs encoding CRISPR-Cas13 components can be packaged into non-integrating lentiviral particles pseudotyped with viral envelope proteins, for example, the Spike glycoprotein from SARS-CoV-2 coronavirus, which provides specificity for entry into ACE2 receptor expressing cells. This allows for specific targeting of ‘coronavirus-targeted’ cell types. FIG. 4C depicts a schematic demonstrating that post-transduction, processing and formation of non-integrating lentiviral episomes allows for transient expression of CRISPR-Cas13 components for acute targeted degradation of CoV genomic and subgenomic viral mRNAs.

[0026] FIG. 5 depicts SARS-CoV-2 leader sequence conservation and targeting sites.

[0027] FIG. 6 depicts tiling of SARS-CoV-2 Leader crRNAs.

[0028] FIG. 7, comprising FIG. 7A through FIG. 7C depicts validated CRISPR-Cas13 guide-RNAs targeting the SARS-CoV-2 Leader Sequence. FIG. 7A depicts a schematic depicting the Luciferase reporter containing the SARS-2-CoV Leader sequence and crRNA target sites locations. FIG. 7B depicts a sequence alignment of tiling crRNAs targeting SARS-CoV-2 Leader sequence. Transcriptional Regulatory Sequence (TRS) is highlighted in yellow. FIG. 7C depicts cell-based luciferase assays demonstrating robust knockdown of CoV Leader Luc reporter activity in cells with crRNAs targeting SARS-CoV-2 leader sequence (crRNAs A through G) or Luciferase coding sequence (Luc), relative to a non-targeting crRNA.

[0029] FIG. 8, comprising FIG. 8A through FIG. 8C depicts, validated CRISPR-Cas13 guide-RNAs targeting the SARS-CoV-2 Stem-loop Like-2 (S2M) Sequence. FIG. 8A depicts a schematic depicting the Luciferase reporter containing the SARS-2-CoV S2M sequence and crRNA target sites locations. FIG. 8B depicts a sequence alignment of tiling crRNAs targeting SARS-CoV-2 S2M sequence. FIG. 8C depicts cell-based luciferase assays demonstrating robust knockdown of CoV S2M Luc reporter activity in cells with crRNAs targeting SARS-CoV-2 S2M sequence (crRNAs A through F) or Luciferase coding sequence (Luc), relative to a non-targeting crRNA.

[0030] FIG. 9, comprising FIG. 9A through FIG. 9E, depicts one-step directional assembly of CRISPR-Cas13 crRNA arrays. FIG. 9A is a schematic depicting the genomic organization of a bacterial CRISPR-Cas13 locus, which typically consists of a single Cas13 protein and CRISPR array containing multiple Spacer and Direct Repeat (DR) sequences. FIG. 9B is a schematic demonstrating that each functional CRISPR guide RNA is processed to include a Spacer and Direct Repeat. Spacer sequences are anti-sense to Target sequences and provide target specificity, whereas the DR sequence acts as a handle for binding to Cas13 protein. FIG. 9C is a schematic depicting that mammalian crRNA expression cassettes are typically constructed by annealing and ligating oligonucleotides comprising a desired spacer sequence. FIG. 9D is a schematic demonstrating that harnessing tolerable nucleotide substitutions within the loop region of the DR, multiple guide-RNAs are efficiently generated in an ordered array FIG. 9E depicts potential tolerable nucleotide substitutions within the loop region of PspCas13b DR which could be harnessed for array assembly.

[0031] FIG. 10, comprising FIG. 10A through FIG. 10C, depicts the identification and validation of non-essential loop residues in Cas13b Direct Repeat (DR). FIG. 10A depicts all possible mutations at positions T17 and T18 of the PspCas13b Direct Repeat. FIG. 10B is a schematic depicting the Luciferase reporter and crRNA target sites locations. FIG. 10C depicts experimental results demonstrating CRISPR-Cas13b knockdown of Luciferase activity with two independent guide RNAs containing individual DR loop mutations.

[0032] FIG. 10, comprising FIG. 10A through FIG. 10C, depicts the identification and validation of non-essential loop residues in Cas13b Direct Repeat (DR). FIG. 10A depicts all possible mutations at positions T17 and T18 of the PspCas13b Direct Repeat. FIG. 10B is a schematic depicting the Luciferase reporter and crRNA target sites locations. FIG. 10C depicts experimental results demonstrating CRISPR-Cas13b knockdown of Luciferase activity with two independent guide RNAs containing individual DR loop mutations.

[0033] FIG. 11, comprising FIG. 11A through FIG. 11C, depicts targeted knockdown of a SARS-CoV-2 Luciferase Reporter with a Guide-RNA array. FIG. 11A is a schematic depicting the lentiviral gene transfer plasmids encoding CRISPR-Cas13 expression cassettes encoding either single or triple guide RNA arrays. FIG. 11B is a schematic of a Luciferase reporter containing multiple SARS-CoV-2 viral sequences within the 5′ and 3′ UTRs. FIG. 11C depicts experimental results demonstrating relative luciferase activity knockdown through expression of CRISPR-Cas13 RNA targeting components driven by single (LDR-D) or triple guide-RNAs (LDR-DIN-B/S2M-D) targeting the SARS-CoV-2 luciferase reporter, relative to negative control non-targeting crRNA (NC).

[0034] FIG. 12 is a schematic of the CRISPR-Cas13 expression cassette encoding triple guide RNAs can be packaged in AAV viral vectors.

[0035] FIG. 13, comprising FIG. 13A and FIG. 13B, is a schematic of the influenza virus. FIG. 13A is a schematic of Influenza viral RNAs (vRNAs). Influenza is an enveloped, negative-sense RNA virus which is composed of 8 vRNA segments. FIG. 13A is a schematic of influenza virus particles. All eight vRNAs are packed within an enveloped virus which utilizes viral proteins HA and NA for host cell binding and fusion.

[0036] FIG. 14, comprising FIG. 14A and FIG. 14B, is a schematic of the Packaging and Delivery CRISPR-Cas13 RNA editing components to target Influenza. FIG. 14A is a schematic demonstrating that the CRISPR-Cas13 editing components, including a CRISPR guide RNA array and Cas13 protein, can be packaged into viral gene therapy vectors, for example, integration deficient lentiviral vectors. Pseudotyping of lentiviral vectors with Influenza NA and HA envelope proteins is one method for delivery to host cells targeted by Influenza virus. FIG. 14A is a schematic demonstrating that upon viral vector fusion and delivery, expression of CRISPR-Cas13 components will result in targeted degradation of vRNAs or viral mRNAs. For targeting of vRNAs, robust nuclear localization of Cas13 protein may be necessary.

[0037] FIG. 15, comprising FIG. 15A and FIG. 15B, depicts experimental results demonstrating pseudotyping lentiviral vectors with SARS-CoV spike envelope proteins. FIG. 15A is a schematic demonstrating that N and C-terminal modifications (4LV) are required for pseudotyping lentivirus with CoV Spike proteins from SARS-Cov-1 and SARS-CoV-2. FIG. 15B depicts experimental results demonstrating that wild type (WT) CoV spike proteins are not suitable for pseudotyping lentivirus for transduction of HEK293T cells or HEK293T cells expressing human ACE2 (ACE2-HEK293T). Expression of the human ACE2 receptor in HEK293T cells is both necessary and sufficient for transduction by 4LV pseudotyped lentiviral vectors. VSV-G envelopes allow for pseudotyping lentivirus for broad transduction of many cell types in vitro, independent of ACE2 expression.

[0038] FIG. 16, comprising FIG. 16A and FIG. 16B, depicts experimental results demonstrating the activity of Cas13b crRNAs targeting Positive- and Negative-sense highly conserved Influenza A RNA sequences. FIG. 16A depicts experimental results of guide RNAs targeting positive-sense conserved RNA sequences in Influenza A Segments 1, 2, 3, 5 and 7. FIG. 16B depicts experimental results of negative-sense conserved RNA sequences in Influenza A Segments 1, 2, 3, 5 and 7. All Influenza A targeting crRNAs showed robust knockdown efficiency of luciferase reporters carrying corresponding Influenza A Segment-specific target sequences, relative to a non-targeting (NT) crRNA.

### DETAILED DESCRIPTION

[0039] In some embodiments, the disclosure provides tandem arrays of crRNA sequences. In one embodiment, the tandem array comprises one or more, two or more, three or more, four or more, five or more, six or more, seven or more, or eight or more unique crRNA sequences.

[0040] In one embodiment, the crRNA sequences of the tandem array comprise a guide sequence and a direct repeat (DR) sequence. In one embodiment, each DR sequence is unique. In one embodiment, the tandem array can be formed via a single ligation step.

### Definitions

[0041] Unless defined otherwise, all technical and scientific terms used herein have the same meaning as commonly understood by one of ordinary skill in the art to which this invention belongs.

[0042] Generally, the nomenclature used herein and the laboratory procedures in cell culture, molecular genetics, organic chemistry, and nucleic acid chemistry and hybridization are those well-known and commonly employed in the art.

[0043] Standard techniques are used for nucleic acid and peptide synthesis. The techniques and procedures are generally performed according to conventional methods in the art and various general references (e.g., Sambrook and Russell, 2012, Molecular Cloning, A Laboratory Approach, Cold Spring Harbor Press, Cold Spring Harbor, N.Y., and Ausubel et al., 2012, Current Protocols in Molecular Biology, John Wiley & Sons, NY), which are provided throughout this document.

[0044] The nomenclature used herein, and the laboratory procedures used in analytical chemistry and organic syntheses described below are those well-known and commonly employed in the art. Standard techniques or modifications thereof are used for chemical syntheses and chemical analyses.

[0045] The term “a,” “an,” “the” and similar terms used in the context of the present invention (especially in the context of the claims) are to be construed to cover both the singular and plural unless otherwise indicated herein or clearly contradicted by the context.

[0046] “About” as used herein when referring to a measurable value such as an amount, a temporal duration, and the like, is meant to encompass variations of ±20%, or ±10%, or ±5%, or ±1%, or ±0.1% from the specified value, as such variations are appropriate to perform the disclosed methods.

[0047] “Antisense” refers particularly to the nucleic acid sequence of the non-coding strand of a double stranded DNA molecule encoding a protein, or to a sequence which is substantially homologous to the non-coding strand. As defined herein, an antisense sequence is complementary to the sequence of a double stranded DNA molecule encoding a protein. It is not necessary that the antisense sequence be complementary solely to the coding portion of the coding strand of the DNA molecule. The antisense sequence may be complementary to regulatory sequences specified on the coding strand of a DNA molecule encoding a protein, which regulatory sequences control expression of the coding sequences.

[0048] A “disease” is a state of health of an animal wherein the animal cannot maintain homeostasis, and wherein if the disease is not ameliorated then the animal's health continues to deteriorate.

[0049] In contrast, a “disorder” in an animal is a state of health in which the animal is able to maintain homeostasis, but in which the animal's state of health is less favorable than it would be in the absence of the disorder. Left untreated, a disorder does not necessarily cause a further decrease in the animal's state of health.

[0050] A disease or disorder is “alleviated” if the severity of a sign or symptom of the disease or disorder, the frequency with which such a sign or symptom is experienced by a patient, or both, is reduced.

[0051] “Encoding” refers to the inherent property of specific sequences of nucleotides in a polynucleotide, such as a gene, a cDNA, or an mRNA, to serve as templates for synthesis of other polymers and macromolecules in biological processes having either a defined sequence of nucleotides (i.e., rRNA, tRNA and mRNA) or a defined sequence of amino acids and the biological properties resulting therefrom. Thus, a gene encodes a protein if transcription and translation of mRNA corresponding to that gene produces the protein in a cell or other biological system. Both the coding strand, the nucleotide sequence of which is identical to the mRNA sequence and is usually provided in sequence listings, and the non-coding strand, used as the template for transcription of a gene or cDNA, can be referred to as encoding the protein or other product of that gene or cDNA.

[0052] The terms “patient,” “subject,” “individual,” and the like are used interchangeably herein, and refer to any animal or cell whether in vitro or in vivo, amenable to the methods described herein. In one embodiment, the subjects include vertebrates and invertebrates. Invertebrates include, but are not limited to, Drosophila melanogaster and Caenorhabditis elegans. Vertebrates include, but are not limited to, primates, rodents, domestic animals or game animals. Primates include, but are not limited to, chimpanzees, cynomologous monkeys, spider monkeys, and macaques (e.g., Rhesus). Rodents include, but are not limited to, mice, rats, woodchucks, ferrets, rabbits and hamsters. Domestic and game animals include, but are not limited to, cows, horses, pigs, deer, bison, buffalo, feline species (e.g., domestic cat), canine species (e.g., dog, fox, wolf), avian species (e.g., chicken, emu, ostrich), and fish (e.g., zebrafish, trout, catfish and salmon). In some embodiments, the subject is a mammal, e.g., a primate, e.g., a human. In certain non-limiting embodiments, the patient, subject or individual is a human.

[0053] By the term “specifically binds,” as used herein with respect to an antibody, is meant an antibody which recognizes a specific antigen, but does not substantially recognize or bind other molecules in a sample. For example, an antibody that specifically binds to an antigen from one species may also bind to that antigen from one or more species. But, such cross-species reactivity does not itself alter the classification of an antibody as specific. In another example, an antibody that specifically binds to an antigen may also bind to different allelic forms of the antigen. However, such cross reactivity does not itself alter the classification of an antibody as specific.

[0054] In some instances, the terms “specific binding” or “specifically binding,” can be used in reference to the interaction of an antibody, a protein, or a peptide with a second chemical species, to mean that the interaction is dependent upon the presence of a particular structure (e.g., an antigenic determinant or epitope) on the chemical species; for example, an antibody recognizes and binds to a specific protein structure rather than to proteins generally. If an antibody is specific for epitope “A”, the presence of a molecule containing epitope A (or free, unlabeled A), in a reaction containing labeled “A” and the antibody, will reduce the amount of labeled A bound to the antibody.

[0055] A “coding region” of a gene consists of the nucleotide residues of the coding strand of the gene and the nucleotides of the non-coding strand of the gene which are homologous with or complementary to, respectively, the coding region of an mRNA molecule which is produced by transcription of the gene.

[0056] A “coding region” of a mRNA molecule also consists of the nucleotide residues of the mRNA molecule which are matched with an anti-codon region of a transfer RNA molecule during translation of the mRNA molecule or which encode a stop codon. The coding region may thus include nucleotide residues comprising codons for amino acid residues which are not present in the mature protein encoded by the mRNA molecule (e.g., amino acid residues in a protein export signal sequence).

[0057] “Complementary” as used herein to refer to a nucleic acid, refers to the broad concept of sequence complementarity between regions of two nucleic acid strands or between two regions of the same nucleic acid strand. It is known that an adenine residue of a first nucleic acid region is capable of forming specific hydrogen bonds (“base pairing”) with a residue of a second nucleic acid region which is antiparallel to the first region if the residue is thymine or uracil. Similarly, it is known that a cytosine residue of a first nucleic acid strand is capable of base pairing with a residue of a second nucleic acid strand which is antiparallel to the first strand if the residue is guanine. A first region of a nucleic acid is complementary to a second region of the same or a different nucleic acid if, when the two regions are arranged in an antiparallel fashion, at least one nucleotide residue of the first region is capable of base pairing with a residue of the second region. In one embodiment, the first region comprises a first portion and the second region comprises a second portion, whereby, when the first and second portions are arranged in an antiparallel fashion, at least about 50%, at least about 75%, at least about 90%, or at least about 95% of the nucleotide residues of the first portion are capable of base pairing with nucleotide residues in the second portion. In one embodiment, all nucleotide residues of the first portion are capable of base pairing with nucleotide residues in the second portion.

[0058] The term “DNA” as used herein is defined as deoxyribonucleic acid.

[0059] The term “expression” as used herein is defined as the transcription and/or translation of a particular nucleotide sequence driven by its promoter.

[0060] The term “expression vector” as used herein refers to a vector containing a nucleic acid sequence coding for at least part of a gene product capable of being transcribed. In some cases, RNA molecules are then translated into a protein, polypeptide, or peptide. In other cases, these sequences are not translated, for example, in the production of antisense molecules, siRNA, ribozymes, and the like. Expression vectors can contain a variety of control sequences, which refer to nucleic acid sequences necessary for the transcription and possibly translation of an operatively linked coding sequence in a particular host organism. In addition to control sequences that govern transcription and translation, vectors and expression vectors may contain nucleic acid sequences that serve other functions as well.

[0061] As used herein the term “wild type” is a term of the art understood by skilled persons and means the typical form of an organism, strain, gene or characteristic as it occurs in nature as distinguished from mutant or variant forms.

[0062] The term “homology” refers to a degree of complementarity. There may be partial homology or complete homology (i.e., identity). Homology is often measured using sequence analysis software (e.g., Sequence Analysis Software Package of the Genetics Computer Group. University of Wisconsin Biotechnology Center. 1710 University Avenue. Madison, Wis. 53705). Such software matches similar sequences by assigning degrees of homology to various substitutions, deletions, insertions, and other modifications. Conservative substitutions typically include substitutions within the following groups: glycine, alanine; valine, isoleucine, leucine; aspartic acid, glutamic acid, asparagine, glutamine; serine, threonine; lysine, arginine; and phenylalanine, tyrosine.

[0063] By “nucleic acid” is meant any nucleic acid, whether composed of deoxyribonucleosides or ribonucleosides, and whether composed of phosphodiester linkages or modified linkages such as phosphotriester, phosphoramidate, siloxane, carbonate, carboxymethylester, acetamidate, carbamate, thioether, bridged phosphoramidate, bridged methylene phosphonate, phosphorothioate, methylphosphonate, phosphorodithioate, bridged phosphorothioate or sulfone linkages, and combinations of such linkages. The term nucleic acid also specifically includes nucleic acids composed of bases other than the five biologically occurring bases (adenine, guanine, thymine, cytosine and uracil). The term “nucleic acid” typically refers to large polynucleotides.

[0064] Conventional notation is used herein to describe polynucleotide sequences: the left-hand end of a single-stranded polynucleotide sequence is the 5′-end; the left-hand direction of a double-stranded polynucleotide sequence is referred to as the 5′-direction.

[0065] The direction of 5′ to 3′ addition of nucleotides to nascent RNA transcripts is referred to as the transcription direction. The DNA strand having the same sequence as an mRNA is referred to as the “coding strand”; sequences on the DNA strand which are located 5′ to a reference point on the DNA are referred to as “upstream sequences”; sequences on the DNA strand which are 3′ to a reference point on the DNA are referred to as “downstream sequences.”

[0066] In the context of the present invention, the following abbreviations for the commonly occurring nucleic acid bases are used. “A” refers to adenosine, “C” refers to cytosine, “G” refers to guanosine, “T” refers to thymidine, and “U” refers to uridine.

[0067] As used herein, the terms “peptide,” “polypeptide,” and “protein” are used interchangeably, and refer to a compound comprised of amino acid residues covalently linked by peptide bonds. A protein or peptide must contain at least two amino acids, and no limitation is placed on the maximum number of amino acids that can comprise a protein's or peptide's sequence. Polypeptides include any peptide or protein comprising two or more amino acids joined to each other by peptide bonds. As used herein, the term refers to both short chains, which also commonly are referred to in the art as peptides, oligopeptides and oligomers, for example, and to longer chains, which generally are referred to in the art as proteins, of which there are many types. “Polypeptides” include, for example, biologically active fragments, substantially homologous polypeptides, oligopeptides, homodimers, heterodimers, variants of polypeptides, modified polypeptides, derivatives, analogs, fusion proteins, among others. The polypeptides include natural peptides, recombinant peptides, synthetic peptides, or a combination thereof.

[0068] The term “RNA” as used herein is defined as ribonucleic acid.

[0069] “Variant” as the term is used herein, is a nucleic acid sequence or a peptide sequence that differs in sequence from a reference nucleic acid sequence or peptide sequence respectively, but retains essential biological properties of the reference molecule. Changes in the sequence of a nucleic acid variant may not alter the amino acid sequence of a peptide encoded by the reference nucleic acid, or may result in amino acid substitutions, additions, deletions, fusions and truncations. Changes in the sequence of peptide variants are typically limited or conservative, so that the sequences of the reference peptide and the variant are closely similar overall and, in many regions, identical. A variant and reference peptide can differ in amino acid sequence by one or more substitutions, additions, deletions in any combination. A variant of a nucleic acid or peptide can be a naturally occurring such as an allelic variant, or can be a variant that is not known to occur naturally. Non-naturally occurring variants of nucleic acids and peptides may be made by mutagenesis techniques or by direct synthesis.

[0070] A “vector” is a composition of matter which comprises an isolated nucleic acid and which can be used to deliver the isolated nucleic acid to the interior of a cell. Numerous vectors are known in the art including, but not limited to, linear polynucleotides, polynucleotides associated with ionic or amphiphilic compounds, plasmids, and viruses. Thus, the term “vector” includes an autonomously replicating plasmid or a virus. The term should also be construed to include non-plasmid and non-viral compounds which facilitate transfer of nucleic acid into cells, such as, for example, polylysine compounds, liposomes, and the like. Examples of viral vectors include, but are not limited to, adenoviral vectors, adeno-associated virus vectors, retroviral vectors, and the like.

[0071] As used herein, the term “guide sequence,” “spacer sequence” “crRNA,” “guide RNA,” or “single guide RNA,” or “gRNA” refers to a polynucleotide comprising any polynucleotide sequence having sufficient complementarity with a target nucleic acid sequence to hybridize with the target nucleic acid sequence and to direct sequence-specific binding of a RNA-targeting complex comprising the guide sequence and a CRISPR effector protein to the target nucleic acid sequence. In some example embodiments, the degree of complementarity, when optimally aligned using a suitable alignment algorithm, is about or more than about 50%, 60%, 75%, 80%, 85%, 90%, 95%, 97.5%, 99%, or more. Optimal alignment may be determined with the use of any suitable algorithm for aligning sequences, non-limiting example of which include the Smith-Waterman algorithm, the Needleman-Wunsch algorithm, algorithms based on the Burrows-Wheeler Transform (e.g., the Burrows Wheeler Aligner), ClustalW, Clustal X, BLAT, Novoalign (Novocraft Technologies; available at www.novocraft.com), ELAND (Illumina, San Diego, Calif.), SOAP (available at soap.genomics.org.cn), and Maq (available at maq.sourceforge.net). The ability of a guide sequence (within a nucleic acid-targeting guide RNA) to direct sequence-specific binding of a nucleic acid-targeting complex to a target nucleic acid sequence may be assessed by any suitable assay. For example, the components of a nucleic acid-targeting CRISPR system sufficient to form a nucleic acid-targeting complex, including the guide sequence to be tested, may be provided to a host cell having the corresponding target nucleic acid sequence, such as by transfection with vectors encoding the components of the nucleic acid-targeting complex, followed by an assessment of preferential targeting (e.g., cleavage) within the target nucleic acid sequence, such as by Surveyor assay as described herein. Similarly, cleavage of a target nucleic acid sequence may be evaluated in a test tube by providing the target nucleic acid sequence, components of a nucleic acid-targeting complex, including the guide sequence to be tested and a control guide sequence different from the test guide sequence, and comparing binding or rate of cleavage at the target sequence between the test and control guide sequence reactions. Other assays are possible, and will occur to those skilled in the art. A guide sequence, and hence a nucleic acid-targeting guide may be selected to target any target nucleic acid sequence. The target sequence may be DNA. The target sequence may be any RNA sequence. In some embodiments, the target sequence may be a sequence within a RNA molecule selected from the group consisting of messenger RNA (mRNA), pre-mRNA, ribosomal RNA (rRNA), transfer RNA (tRNA), micro-RNA (miRNA), small interfering RNA (siRNA), small nuclear RNA (snRNA), small nucleolar RNA (snoRNA), double stranded RNA (dsRNA), non-coding RNA (ncRNA), long non-coding RNA (lncRNA), and small cytoplasmatic RNA (scRNA). In some preferred embodiments, the target sequence may be a sequence within a RNA molecule selected from the group consisting of mRNA, pre-mRNA, and rRNA. In some preferred embodiments, the target sequence may be a sequence within a RNA molecule selected from the group consisting of ncRNA, and lncRNA. In some more preferred embodiments, the target sequence may be a sequence within an mRNA molecule or a pre-mRNA molecule.

[0072] Ranges: throughout this disclosure, various aspects of the invention can be presented in a range format. It should be understood that the description in range format is merely for convenience and brevity and should not be construed as an inflexible limitation on the scope of the invention. Accordingly, the description of a range should be considered to have specifically disclosed all the possible subranges as well as individual numerical values within that range. For example, description of a range such as from 1 to 6 should be considered to have specifically disclosed subranges such as from 1 to 3, from 1 to 4, from 1 to 5, from 2 to 4, from 2 to 6, from 3 to 6 etc., as well as individual numbers within that range, for example, 1, 2, 2.7, 3, 4, 5, 5.3, and 6. This applies regardless of the breadth of the range.

### Proteins

[0073] In one aspect, the present disclosure is based on the development of novel editing proteins which provide targeted RNA cleavage. In some embodiment, the proteins comprise a localization signal. In one embodiment, the localization signal localizes the protein to the site in which a target RNA is located. In one embodiment, the protein comprises a nuclear localization signal (NLS), to target RNA in the nucleus. In one embodiment, the protein comprises an nuclear export signal (NES), to target RNA in the cytoplasm. In one embodiment, the fusion protein comprises a purification and/or detection tag.

[0074] In one aspect, the present disclosure is based on the development of novel editing proteins which provide targeted RNA cleavage and are effectively delivered. In some embodiment, the proteins comprise a localization signal. In one embodiment, the localization signal localizes the protein to the site in which a target RNA is located. In one embodiment, the protein comprises a purification and/or detection tag.

[0075] In one aspect, the present disclosure is based on the development of novel editing proteins which are capable of modulating the cleavage and/or polyadenylation of nuclear RNA and are effectively delivered to the nucleus. In some embodiment, the proteins comprise a cleavage and/or polyadenylation protein. In some embodiment, the proteins comprise a nuclear localization signal. In one embodiment, the protein comprises a purification and/or detection tag.

[0076] Editing Protein

[0077] In one embodiment, the editing protein includes, but is not limited to, a CRISPR-associated (Cas) protein, a zinc finger nuclease (ZFN) protein, and a protein having a DNA or RNA binding domain.

[0078] Non-limiting examples of Cas proteins include Cas1, Cas1B, Cas2, Cas3, Cas4, Cas5, Cas6, Cas7, Cas8, Cas9, Cas10, Csy1, Csy2, Csy3, Cse1, Cse2, Csc1, Csc2, Csa5, Csn2. Csm2, Csm3, Csm4, Csm5, Csm6, Cmr1, Cmr3, Cmr4, Cmr5, Cmr6, Csb1, Csb2, Csb3, Csx17, Csx14, Csx10, Csx16, CsaX, Csx3, Csx1, Csx15, Csf1, Csf2, Csf3, Csf4, SpCas9, StCas9, NmCas9, SaCas9, CjCas9, CjCas9, AsCpf1, LbCpf1, FnCpf1, VRER SpCas9, VQR SpCas9, xCas9 3.7, homologs thereof, orthologs thereof, or modified versions thereof. In some embodiments, the Cas protein has DNA or RNA cleavage activity. In some embodiments, the Cas protein directs cleavage of one or both strands of a nucleic acid molecule at the location of a target sequence, such as within the target sequence and/or within the complement of the target sequence. In some embodiments, the Cas protein directs cleavage of one or both strands within about 1, 2, 3, 4, 5, 6, 7, 8, 9, 10, 15, 20, 25, 50, 100, 200, 500, or more base pairs from the first or last nucleotide of a target sequence. In one embodiment, the Cas protein is Cas9, Cas13, or Cpf1. In one embodiment, Cas protein is catalytically deficient (dCas).

[0079] In one embodiment, the Cas protein has RNA binding activity. In one embodiment, Cas protein is Cas13. In one embodiment, the Cas protein is PspCas13b, PspCas13b Truncation, AdmCas13d, AspCas13b, AspCas13c, BmaCas13a, BzoCas13b, CamCas13a, CcaCas13b, Cga2Cas13a, CgaCas13a, EbaCas13a, EreCas13a, EsCas13d, FbrCas13b, FnbCas13c, FndCas13c, FnfCas13c, FnsCas13c, FpeCas13c, FulCas13c, HheCas13a, LbfCas13a, LbmCas13a, LbnCas13a, LbuCas13a, LseCas13a, LshCas13a, LspCas13a, Lwa2cas13a, LwaCas13a, LweCas13a, PauCas13b, PbuCas13b, PgiCas13b, PguCas13b, Pin2Cas13b, Pin3Cas13b, PinCas13b, Pprcas13a, PsaCas13b, PsmCas13b, RaCas13d, RanCas13b, RcdCas13a, RcrCas13a, RcsCas13a, RfxCas13d, UrCas13d, dPspCas13b, PspCas13b_A133H, PspCas13b_A1058H, dPspCas13b truncation, dAdmCas13d, dAspCas13b, dAspCas13c, dBmaCas13a, dBzoCas13b, dCamCas13a, dCcaCas13b, dCga2Cas13a, dCgaCas13a, dEbaCas13a, dEreCas13a, dEsCas13d, dFbrCas13b, dFnbCas13c, dFndCas13c, dFnfCas13c, dFnsCas13c, dFpeCas13c, dFulCas13c, dHheCas13a, dLbfCas13a, dLbmCas13a, dLbnCas13a, dLbuCas13a, dLseCas13a, dLshCas13a, dLspCas13a, dLwa2cas13a, dLwaCas13a, dLweCas13a, dPauCas13b, dPbuCas13b, dPgiCas13b, dPguCas13b, dPin2Cas13b, dPin3Cas13b, dPinCas13b, dPprCas13a, dPsaCas13b, dPsmCas13b, dRaCas13d, dRanCas13b, dRcdCas13a, dRcrCas13a, dRcsCas13a, dRfxCas13d, or dUrCas13d. Additional Cas proteins are known in the art (e.g., Konermann et al., Cell, 2018, 173:665-676 e14, Yan et al., Mol Cell, 2018, 7:327-339 e5; Cox, D. B. T., et al., Science, 2017, 358: 1019-1027; Abudayyeh et al., Nature, 2017, 550: 280-284, Gootenberg et al., Science, 2017, 356: 438-442; and East-Seletsky et al., Mol Cell, 2017, 66: 373-383 e3, which are herein incorporated by reference).

[0080] In one embodiment, the Cas protein comprises a sequence at least 70%, at least 71%, at least 72%, at least 73%, at least 74%, at least 75%, at least 76%, at least 77%, at least 78%, at least 79%, at least 80%, at least 81%, at least 82%, at least 83%, at least 84%, at least 85%, at least 86%, at least 87%, at least 88%, at least 89%, at least 90%, at least 91%, at least 92%, at least 93%, at least 94%, at least 95%, at least 96%, at least 97%, at least 98%, or at least 99% identical to one of SEQ ID NOs:1-49. In one embodiment, the Cas protein comprises a sequence at least 70%, at least 71%, at least 72%, at least 73%, at least 74%, at least 75%, at least 76%, at least 77%, at least 78%, at least 79%, at least 80%, at least 81%, at least 82%, at least 83%, at least 84%, at least 85%, at least 86%, at least 87%, at least 88%, at least 89%, at least 90%, at least 91%, at least 92%, at least 93%, at least 94%, at least 95%, at least 96%, at least 97%, at least 98%, or at least 99% identical to one of SEQ ID NOs: 1-47. In one embodiment, the Cas protein comprises a sequence of one of SEQ ID NOs:1-49. In one embodiment, the Cas protein comprises a sequence of one of SEQ ID NOs:1-47.

[0081] Localization Signal

[0082] In some embodiments, the protein may contain a localization signal, such as an nuclear localization signal (NLS), nuclear export signal (NES) or other localization signals to localize to organelles, such as mitochondria, or to localize in the cytoplasm. In one embodiment, the localization signal localizes the protein to the site in which a target RNA is located.

[0083] Nuclear Localization Signal

[0084] In one embodiment, the protein comprises a NLS. In one embodiment, the NLS is a retrotransposon NLS. In one embodiment, the NLS is derived from Ty1, yeast GAL4, SKI3, L29 or histone H2B proteins, polyoma virus large T protein, VP1 or VP2 capsid protein, SV40 VP1 or VP2 capsid protein, Adenovirus Ela or DBP protein, influenza virus NS1 protein, hepatitis vims core antigen or the mammalian lamin, c-myc, max, c-myb, p53, c-erbA, jun, Tax, steroid receptor or Mx proteins, Nucleoplasmin (NPM2), Nucleophosmin (NPM1), or simian vims 40 (“SV40”) T-antigen. In one embodiment, the NLS is a Ty1 or Ty1-derived NLS, a Ty2 or Ty2-derived NLS or a MAK11 or MAK11-derived NLS. In one embodiment, the Ty1 NLS comprises an amino acid sequence of SEQ ID NO:50. In one embodiment, the Ty2 NLS comprises an amino acid sequence of SEQ ID NO:51. In one embodiment, the MAK11 NLS comprises an amino acid sequence of SEQ ID NO:52. In one embodiment, the NLS comprises a sequence at least 70%, at least 71%, at least 72%, at least 73%, at least 74%, at least 75%, at least 76%, at least 77%, at least 78%, at least 79%, at least 80%, at least 81%, at least 82%, at least 83%, at least 84%, at least 85%, at least 86%, at least 87%, at least 88%, at least 89%, at least 90%, at least 91%, at least 92%, at least 93%, at least 94%, at least 95%, at least 96%, at least 97%, at least 98%, or at least 99% identical to one of SEQ ID NOs: 50-57 and 323-935. In one embodiment, the NLS comprises a sequence of one of SEQ ID NOs: 50-57 and 323-935.

[0085] In one embodiment, the NLS is a Ty1-like NLS. For example, in one embodiment, the Ty1-like NLS comprises KKRX motif. In one embodiment, the Ty1-like NLS comprises KKRX motif at the N-terminal end. In one embodiment, the Ty1-like NLS comprises KKR motif. In one embodiment, the Ty1-like NLS comprises KKR motif at the C-terminal end. In one embodiment, the Ty1-like NLS comprises a KKRX and a KKR motif. In one embodiment, the Ty1-like NLS comprises a KKRX at the N-terminal end and a KKR motif at the C-terminal end. In one embodiment, the Ty1-like NLS comprises at least 20 amino acids. In one embodiment, the Ty1-like NLS comprises between 20 and 40 amino acids. In one embodiment, the Ty1-like NLS comprises a sequence at least 70%, at least 71%, at least 72%, at least 73%, at least 74%, at least 75%, at least 76%, at least 77%, at least 78%, at least 79%, at least 80%, at least 81%, at least 82%, at least 83%, at least 84%, at least 85%, at least 86%, at least 87%, at least 88%, at least 89%, at least 90%, at least 91%, at least 92%, at least 93%, at least 94%, at least 95%, at least 96%, at least 97%, at least 98%, or at least 99% identical to one of SEQ ID NOs: 323-935. In one embodiment, the NLS comprises a sequence of one of SEQ ID NOs: 323-935, wherein the sequence comprises one or more, two or more, three or more, four or more, five or more, six or more, seven or more, eight or more, nine or more, or ten or more, insertions, deletions or substitutions. In one embodiment, the Ty1-like NLS comprises a sequence of one of SEQ ID NOs: 323-935.

[0086] In one embodiment, the NLS comprises two copies of the same NLS. For example, in one embodiment, the NLS comprises a multimer of a first Ty1-derived NLS and a second Ty1-derived NLS.

[0087] Nuclear Export Signal

[0088] In one embodiment, the protein comprises a Nuclear Export Signal (NES). In one embodiment, the NES is attached to the N-terminal end of the Cas protein. In one embodiment, the NES localizes the protein to the cytoplasm for targeting cytoplasmic RNA. In one embodiment, the NES comprises an amino acid sequence at least 70%, at least 71%, at least 72%, at least 73%, at least 74%, at least 75%, at least 76%, at least 77%, at least 78%, at least 79%, at least 80%, at least 81%, at least 82%, at least 83%, at least 84%, at least 85%, at least 86%, at least 87%, at least 88%, at least 89%, at least 90%, at least 91%, at least 92%, at least 93%, at least 94%, at least 95%, at least 96%, at least 97%, at least 98%, or at least 99% identical to SEQ ID NOs:58 or 59. In one embodiment, the NES comprises an amino acid sequence of SEQ ID NOs: 58 or 59.

[0089] Organelle Localization Signal

[0090] In one embodiment, the protein comprises a localization signal that localizes the protein to an organelle. In one embodiment, the localization signal localizes the protein to the nucleolus, ribosome, vesicle, rough endoplasmic reticulum, Golgi apparatus, cytoskeleton, smooth endoplasmic reticulum, mitochondria, vacuole, cytosol, lysosome, or centriole. A number of localization signals are known in the art.

[0091] In one embodiment, the protein comprises a localization signal that localizes the protein to an organelle or extracellularly. In one embodiment, the localization signal localizes the protein to the nucleolus, ribosome, vesicle, rough endoplasmic reticulum, Golgi apparatus, cytoskeleton, smooth endoplasmic reticulum, mitochondria, vacuole, cytosol, lysosome, or centriole.

[0092] A number of localization signals are known in the art. Exemplary localization signals include, but are not limited to 1× mitochondrial targeting sequence, 4× mitochondrial targeting sequence, secretory signal sequence (IL-2), myristylation, Calsequestrin leader, KDEL retention and peroxisome targeting sequence.

[0093] In one embodiment, the localization signal comprises sequence at least 70%, at least 71%, at least 72%, at least 73%, at least 74%, at least 75%, at least 76%, at least 77%, at least 78%, at least 79%, at least 80%, at least 81%, at least 82%, at least 83%, at least 84%, at least 85%, at least 86%, at least 87%, at least 88%, at least 89%, at least 90%, at least 91%, at least 92%, at least 93%, at least 94%, at least 95%, at least 96%, at least 97%, at least 98%, or at least 99% identical to SEQ ID NOs:60-66. In one embodiment, the localization signal comprises sequence of SEQ ID NOs: 60-66.

[0094] Purification and/or Detection Tag

[0095] In some embodiments, the protein may contain a purification and/or detection tag. In one embodiment, the tag is on the N-terminal end of the protein. In one embodiment, the tag is a 3×FLAG tag. In one embodiment, the tag comprises an amino acid sequence at least 70%, at least 71%, at least 72%, at least 73%, at least 74%, at least 75%, at least 76%, at least 77%, at least 78%, at least 79%, at least 80%, at least 81%, at least 82%, at least 83%, at least 84%, at least 85%, at least 86%, at least 87%, at least 88%, at least 89%, at least 90%, at least 91%, at least 92%, at least 93%, at least 94%, at least 95%, at least 96%, at least 97%, at least 98%, or at least 99% identical to SEQ ID NO:67. In one embodiment, the tag comprises an amino acid sequence of SEQ ID NO:67.

[0096] Cleavage and/or Polyadenylation Proteins

[0097] In one aspect, fusion proteins comprises an editing protein and a cleavage and/or polyadenylation protein which are effectively delivered to the nucleus. In one embodiment, the cleavage and/or polyadenylation protein is an RNA binding protein of the human 3′ end processing machinery. In one embodiment, the cleavage and/or polyadenylation protein is CPSF30, WDR33, or NUDT21. In one embodiment, the cleavage and/or polyadenylation protein is NUDT21. In one embodiment, the cleavage and/or polyadenylation protein is NUDT21, a NUDT21 mutation, a NUDT21 dimer, a NUDT21 fusion protein or any combination thereof. In one embodiment, the cleavage and/or polyadenylation protein is human NUDT21, Worm NUDT21, Fly NUDT21, Zebrafish NUDT21, NUDT21_R63S, NUDT21_F103A, or a tandem dimer of NUDT21.

[0098] In one embodiment, the cleavage and/or polyadenylation protein comprises an amino acid sequence at least 70%, at least 71%, at least 72%, at least 73%, at least 74%, at least 75%, at least 76%, at least 77%, at least 78%, at least 79%, at least 80%, at least 81%, at least 82%, at least 83%, at least 84%, at least 85%, at least 86%, at least 87%, at least 88%, at least 89%, 90%, at least 91%, at least 92%, at least 93%, at least 94%, at least 95%, at least 96%, at least 97%, at least 98%, or at least 99% identical to one of SEQ ID NOs:298-307. In one embodiment, the cleavage and/or polyadenylation protein comprises an amino acid sequence of one of SEQ ID NOs: 298-307.

[0099] Fusion Proteins

[0100] Fusion Protein Comprising a Cas Protein and Localization Signal

[0101] In one embodiment, the proteins of the disclosure are effectively delivered to the nucleus, an organelle, the cytoplasm or extracellularly and allow for targeted RNA cleavage. In one embodiment, the protein comprises an amino acid sequence 70%, at least 71%, at least 72%, at least 73%, at least 74%, at least 75%, at least 76%, at least 77%, at least 78%, at least 79%, at least 80%, at least 81%, at least 82%, at least 83%, at least 84%, at least 85%, at least 86%, at least 87%, at least 88%, at least 89%, at least 90%, at least 91%, at least 92%, at least 93%, at least 94%, at least 95%, at least 96%, at least 97%, at least 98%, or at least 99% identical to one of SEQ ID NOs:68-100. In one embodiment, the protein comprises an amino acid sequence of one of SEQ ID NOs: 68-100.

[0102] Fusion Protein Comprising a Cas Protein and a Cleavage and/or Polyadenylation Protein

[0103] In one embodiment, the proteins of the disclosure are effectively delivered to the nucleus and allow for targeted RNA cleavage and/or polyadenylation. In one embodiment, the protein comprises an amino acid sequence 70%, at least 71%, at least 72%, at least 73%, at least 74%, at least 75%, at least 76%, at least 77%, at least 78%, at least 79%, at least 80%, at least 81%, at least 82%, at least 83%, at least 84%, at least 85%, at least 86%, at least 87%, at least 88%, at least 89%, at least 90%, at least 91%, at least 92%, at least 93%, at least 94%, at least 95%, at least 96%, at least 97%, at least 98%, or at least 99% identical to one of SEQ ID NOs:308-310. In one embodiment, the protein comprises an amino acid sequence of one of SEQ ID NOs: 308-310.

[0104] Proteins, Peptides and Fusion Proteins

[0105] The proteins of the present disclosure may be made using chemical methods. For example, protein can be synthesized by solid phase techniques (Roberge J Y et al (1995) Science 269: 202-204), cleaved from the resin, and purified by preparative high-performance liquid chromatography. Automated synthesis may be achieved, for example, using the ABI 431 A Peptide Synthesizer (Perkin Elmer) in accordance with the instructions provided by the manufacturer.

[0106] The proteins of the present disclosure may be made using recombinant protein expression. The recombinant expression vectors of the disclosure comprise a nucleic acid of the invention in a form suitable for expression of the nucleic acid in a host cell, which means that the recombinant expression vectors include one or more regulatory sequences, selected on the basis of the host cells to be used for expression, that is operatively-linked to the nucleic acid sequence to be expressed. Within a recombinant expression vector, “operably-linked” is intended to mean that the nucleotide sequence of interest is linked to the regulatory sequences in a manner that allows for expression of the nucleotide sequence (e.g., in an in vitro transcription/translation system or in a host cell when the vector is introduced into the host cell).

[0107] The term “regulatory sequence” is intended to include promoters, enhancers and other expression control elements (e.g., polyadenylation signals). Such regulatory sequences are described, for example, in Goeddel, Gene Expression Technology: Methods in Enzymology 185, Academic Press, San Diego, Calif. (1990). Regulatory sequences include those that direct constitutive expression of a nucleotide sequence in many types of host cell and those that direct expression of the nucleotide sequence only in certain host cells (e.g., tissue-specific regulatory sequences). It will be appreciated by those skilled in the art that the design of the expression vector can depend on such factors as the choice of the host cell to be transformed, the level of expression of protein desired, etc. The expression vectors of the invention can be introduced into host cells to thereby produce proteins or peptides, including fusion proteins or peptides, encoded by nucleic acids as described herein.

[0108] The recombinant expression vectors of the invention can be designed for production of variant proteins in prokaryotic or eukaryotic cells. For example, proteins of the invention can be expressed in bacterial cells such as Escherichia coli, insect cells (using baculovirus expression vectors) yeast cells or mammalian cells. Suitable host cells are discussed further in Goeddel, Gene Expression Technology: Methods in Enzymology 185, Academic Press, San Diego, Calif. (1990). Alternatively, the recombinant expression vector can be transcribed and translated in vitro, for example using T7 promoter regulatory sequences and T7 polymerase.

[0109] Expression of proteins in prokaryotes is most often carried out in Escherichia coli with vectors containing constitutive or inducible promoters directing the expression of either fusion or non-fusion proteins. Fusion vectors add a number of amino acids to a protein encoded therein, to the amino or C terminus of the recombinant protein. Such fusion vectors typically serve three purposes: (i) to increase expression of recombinant protein; (ii) to increase the solubility of the recombinant protein; and (iii) to aid in the purification of the recombinant protein by acting as a ligand in affinity purification. Often, in fusion expression vectors, a proteolytic cleavage site is introduced at the junction of the fusion moiety and the recombinant protein to enable separation of the recombinant protein from the fusion moiety subsequent to purification of the fusion protein. Such enzymes, and their cognate recognition sequences, include Factor Xa, thrombin, PreScission, TEV and enterokinase. Typical fusion expression vectors include pGEX (Pharmacia Biotech Inc; Smith and Johnson, 1988. Gene 67: 31-40), pMAL (New England Biolabs, Beverly, Mass.) and pRITS (Pharmacia, Piscataway, N.J.) that fuse glutathione S-transferase (GST), maltose E binding protein, or protein A, respectively, to the target recombinant protein.

[0110] Examples of suitable inducible non-fusion E. coli expression vectors include pTrc (Amrann et al., (1988) Gene 69:301-315) and pET 11d (Studier et al., Gene Expression Technology: Methods in Enzymology 185, Academic Press, San Diego, Calif. (1990) 60-89)—not accurate, pET11a-d have N terminal T7 tag.

[0111] One strategy to maximize recombinant protein expression in E. coli is to express the protein in a host bacterium with an impaired capacity to proteolytically cleave the recombinant protein. See, e.g., Gottesman, Gene Expression Technology: Methods in Enzymology 185, Academic Press, San Diego, Calif. (1990) 119-128. Another strategy is to alter the nucleic acid sequence of the nucleic acid to be inserted into an expression vector so that the individual codons for each amino acid are those preferentially utilized in E. coli (see, e.g., Wada, et al., 1992. Nucl. Acids Res. 20: 2111-2118). Such alteration of nucleic acid sequences of the invention can be carried out by standard DNA synthesis techniques. Another strategy to solve codon bias is by using BL21-codon plus bacterial strains (Invitrogen) or Rosetta bacterial strain (Novagen), these strains contain extra copies of rare E. coli tRNA genes.

[0112] In another embodiment, the expression vector encoding for the protein of the disclosure is a yeast expression vector. Examples of vectors for expression in yeast Saccharomyces cerevisiae include pYepSec1 (Baldari, et al., 1987. EMBO J. 6: 229-234), pMFa (Kurjan and Herskowitz, 1982. Cell 30: 933-943), pJRY88 (Schultz et al., 1987. Gene 54: 113-123), pYES2 (Invitrogen Corporation, San Diego, Calif.), and picZ (InVitrogen Corp, San Diego, Calif.).

[0113] Alternatively, polypeptides of the present invention can be produced in insect cells using baculovirus expression vectors. Baculovirus vectors available for expression of proteins in cultured insect cells (e.g., SF9 cells) include the pAc series (Smith, et al., 1983. Mol. Cell. Biol. 3: 2156-2165) and the pVL series (Lucklow and Summers, 1989. Virology 170: 31-39).

[0114] In yet another embodiment, a nucleic acid of the disclosure is expressed in mammalian cells using a mammalian expression vector. Mammalian cell lines available in the art for expression of a heterologous polypeptide include, but are not limited to, Chinese hamster ovary (CHO) cells, HeLa cells, baby hamster kidney cells, NSO mouse melanoma cells, YB2/0 rat myeloma cells, human embryonic kidney cells, human embryonic retina cells and many others. Examples of mammalian expression vectors include pCDM8 (Seed, 1987. Nature 329: 840) and pMT2PC (Kaufman, et al., 1987. EMBO J. 6: 187-195), pIRESpuro (Clontech), pUB6 (Invitrogen), pCEP4 (Invitrogen) pREP4 (Invitrogen), pcDNA3 (Invitrogen). When used in mammalian cells, the expression vector's control functions are often provided by viral regulatory elements. For example, commonly used promoters are derived from polyoma, adenovirus 2, cytomegalovirus, Rous Sarcoma Virus, and simian virus 40. For other suitable expression systems for both prokaryotic and eukaryotic cells see, e.g., Chapters 16 and 17 of Sambrook, et al., Molecular Cloning: A Laboratory Manual. 2nd ed., Cold Spring Harbor Laboratory, Cold Spring Harbor Laboratory Press, Cold Spring Harbor, N.Y., 1989.

[0115] In another embodiment, the recombinant mammalian expression vector is capable of directing expression of the nucleic acid preferentially in a particular cell type (e.g., tissue-specific regulatory elements are used to express the nucleic acid). Tissue-specific regulatory elements are known in the art. Non-limiting examples of suitable tissue-specific promoters include the albumin promoter (liver-specific; Pinkert, et al., 1987. Genes Dev. 1: 268-277), lymphoid-specific promoters (Calame and Eaton, 1988. Adv. Immunol. 43: 235-275), in particular promoters of T cell receptors (Winoto and Baltimore, 1989. EMBO J. 8: 729-733) and immunoglobulins (Banerji, et al., 1983. Cell 33: 729-740; Queen and Baltimore, 1983. Cell 33: 741-748), neuron-specific promoters (e.g., the neurofilament promoter; Byrne and Ruddle, 1989. Proc. Natl. Acad. Sci. USA 86: 5473-5477), pancreas-specific promoters (Edlund, et al., 1985. Science 230: 912-916), and mammary gland-specific promoters (e.g., milk whey promoter; U.S. Pat. No. 4,873,316 and European Application Publication No. 264,166). Developmentally-regulated promoters are also encompassed, e.g., the murinehox promoters (Kessel and Gruss, 1990. Science 249: 374-379) and the alpha-fetoprotein promoter (Campes and Tilghman, 1989. Genes Dev. 3: 537-546).

[0116] The invention should also be construed to include any form of a protein having substantial homology to a protein disclosed herein. In one embodiment, a protein which is “substantially homologous” is about 50% homologous, about 70% homologous, about 80% homologous, about 90% homologous, about 91% homologous, about 92% homologous, about 93% homologous, about 94% homologous, about 95% homologous, about 96% homologous, about 97% homologous, about 98% homologous, or about 99% homologous to amino acid sequence of a fusion-protein disclosed herein.

[0117] The protein may alternatively be made by recombinant means or by cleavage from a longer polypeptide. The composition of a protein may be confirmed by amino acid analysis or sequencing.

[0118] The variants of the protein according to the present invention may be (i) one in which one or more of the amino acid residues are substituted with a conserved or non-conserved amino acid residue and such substituted amino acid residue may or may not be one encoded by the genetic code, (ii) one in which there are one or more modified amino acid residues, e.g., residues that are modified by the attachment of substituent groups, (iii) one in which the peptide is an alternative splice variant of the protein of the present invention, (iv) fragments of the peptides and/or (v) one in which the protein is fused with another peptide, such as a leader or secretory sequence or a sequence which is employed for purification (for example, His-tag) or for detection (for example, Sv5 epitope tag). The fragments include peptides generated via proteolytic cleavage (including multi-site proteolysis) of an original sequence. Variants may be post-translationally, or chemically modified. Such variants are deemed to be within the scope of those skilled in the art from the teaching herein.

[0119] As known in the art the “similarity” between two fusion proteins is determined by comparing the amino acid sequence and its conserved amino acid substitutes of one polypeptide to a sequence of a second polypeptide. Variants are defined to include peptide sequences different from the original sequence. In one embodiment, variants are different from the original sequence in less than 40% of residues per segment of interest different from the original sequence in less than 25% of residues per segment of interest, different by less than 10% of residues per segment of interest, or different from the original protein sequence in just a few residues per segment of interest and at the same time sufficiently homologous to the original sequence to preserve the functionality of the original sequence and/or the ability to stimulate the differentiation of a stem cell into the osteoblast lineage. The present invention includes amino acid sequences that are at least 60%, 65%, 70%, 72%, 74%, 76%, 78%, 80%, 90%, 91%, 92%, 93%, 94%, 95%, 96%, 97%, 98%, or 99% similar or identical to the original amino acid sequence. The degree of identity between two peptides is determined using computer algorithms and methods that are widely known for the persons skilled in the art. The identity between two amino acid sequences may be determined by using the BLASTP algorithm [BLAST Manual, Altschul, S., et al., NCBI NLM NIH Bethesda, Md. 20894, Altschul, S., et al., J. Mol. Biol. 215: 403-410 (1990)].

[0120] The protein of the disclosure can be post-translationally modified. For example, post-translational modifications that fall within the scope of the present invention include signal peptide cleavage, glycosylation, acetylation, isoprenylation, proteolysis, myristoylation, protein folding and proteolytic processing, etc. Some modifications or processing events require introduction of additional biological machinery. For example, processing events, such as signal peptide cleavage and core glycosylation, are examined by adding canine microsomal membranes or Xenopus egg extracts (U.S. Pat. No. 6,103,489) to a standard translation reaction.

[0121] The protein of the disclosure may include unnatural amino acids formed by post-translational modification or by introducing unnatural amino acids during translation. A variety of approaches are available for introducing unnatural amino acids during protein translation.

[0122] A protein of the disclosure may be phosphorylated using conventional methods such as the method described in Reedijk et al. (The EMBO Journal 11(4):1365, 1992).

[0123] Cyclic derivatives of the fusion proteins of the invention are also part of the present invention. Cyclization may allow the protein to assume a more favorable conformation for association with other molecules. Cyclization may be achieved using techniques known in the art. For example, disulfide bonds may be formed between two appropriately spaced components having free sulfhydryl groups, or an amide bond may be formed between an amino group of one component and a carboxyl group of another component. Cyclization may also be achieved using an azobenzene-containing amino acid as described by Ulysse, L., et al., J. Am. Chem. Soc. 1995, 117, 8466-8467. The components that form the bonds may be side chains of amino acids, non-amino acid components or a combination of the two. In an embodiment of the invention, cyclic peptides may comprise a beta-turn in the right position. Beta-turns may be introduced into the peptides of the invention by adding the amino acids Pro-Gly at the right position.

[0124] It may be desirable to produce a cyclic protein which is more flexible than the cyclic peptides containing peptide bond linkages as described above. A more flexible peptide may be prepared by introducing cysteines at the right and left position of the peptide and forming a disulfide bridge between the two cysteines. The two cysteines are arranged so as not to deform the beta-sheet and turn. The peptide is more flexible as a result of the length of the disulfide linkage and the smaller number of hydrogen bonds in the beta-sheet portion. The relative flexibility of a cyclic peptide can be determined by molecular dynamics simulations.

[0125] The invention also relates to peptides comprising a fusion protein comprising Cas13 and a RNase protein, wherein the fusion protein is itself fused to, or integrated into, a target protein, and/or a targeting domain capable of directing the chimeric protein to a desired cellular component or cell type or tissue. The chimeric proteins may also contain additional amino acid sequences or domains. The chimeric proteins are recombinant in the sense that the various components are from different sources, and as such are not found together in nature (i.e., are heterologous).

[0126] In one embodiment, the targeting domain can be a membrane spanning domain, a membrane binding domain, or a sequence directing the protein to associate with for example vesicles or with the nucleus. In one embodiment, the targeting domain can target a peptide to a particular cell type or tissue. For example, the targeting domain can be a cell surface ligand or an antibody against cell surface antigens of a target tissue. A targeting domain may target the peptide of the invention to a cellular component.

[0127] A peptide of the invention may be synthesized by conventional techniques. For example, the peptides or chimeric proteins may be synthesized by chemical synthesis using solid phase peptide synthesis. These methods employ either solid or solution phase synthesis methods (see for example, J. M. Stewart, and J. D. Young, Solid Phase Peptide Synthesis, 2^{nd} Ed., Pierce Chemical Co., Rockford Ill. (1984) and G. Barany and R. B. Merrifield, The Peptides: Analysis Synthesis, Biology editors E. Gross and J. Meienhofer Vol. 2 Academic Press, New York, 1980, pp. 3-254 for solid phase synthesis techniques; and M Bodansky, Principles of Peptide Synthesis, Springer-Verlag, Berlin 1984, and E. Gross and J. Meienhofer, Eds., The Peptides: Analysis, Synthesis, Biology, suprs, Vol 1, for classical solution synthesis). By way of example, a peptide of the invention may be synthesized using 9-fluorenyl methoxycarbonyl (Fmoc) solid phase chemistry with direct incorporation of phosphothreonine as the N-fluorenylmethoxy-carbonyl-O-benzyl-L-phosphothreonine derivative.

[0128] N-terminal or C-terminal fusion proteins comprising a peptide or chimeric protein of the invention conjugated with other molecules may be prepared by fusing, through recombinant techniques, the N-terminal or C-terminal of the peptide or chimeric protein, and the sequence of a selected protein or selectable marker with a desired biological function. The resultant fusion proteins contain the protein fused to the selected protein or marker protein as described herein. Examples of proteins which may be used to prepare fusion proteins include immunoglobulins, glutathione-S-transferase (GST), hemagglutinin (HA), and truncated myc.

[0129] Peptides of the invention may be developed using a biological expression system. The use of these systems allows the production of large libraries of random peptide sequences and the screening of these libraries for peptide sequences that bind to particular proteins. Libraries may be produced by cloning synthetic DNA that encodes random peptide sequences into appropriate expression vectors (see Christian et al 1992, J. Mol. Biol. 227:711; Devlin et al, 1990 Science 249:404; Cwirla et al 1990, Proc. Natl. Acad, Sci. USA, 87:6378). Libraries may also be constructed by concurrent synthesis of overlapping peptides (see U.S. Pat. No. 4,708,871).

[0130] The peptides and chimeric proteins of the invention may be converted into pharmaceutical salts by reacting with inorganic acids such as hydrochloric acid, sulfuric acid, hydrobromic acid, phosphoric acid, etc., or organic acids such as formic acid, acetic acid, propionic acid, glycolic acid, lactic acid, pyruvic acid, oxalic acid, succinic acid, malic acid, tartaric acid, citric acid, benzoic acid, salicylic acid, benezenesulfonic acid, and toluenesulfonic acids.

### Nucleic Acids

[0131] In one aspect, the present disclosure novel nucleic acid molecules encoding editing proteins which provide targeted RNA cleavage. In some embodiment, the nucleic acid molecule comprises a nucleic acid sequence encoding a localization signal. In one embodiment, the localization signal localizes the protein to the site in which a target RNA is located. In one embodiment, the nucleic acid molecule comprises a nucleic acid sequence encoding a nuclear localization signal (NLS), to target RNA in the nucleus. In one embodiment, the nucleic acid molecule comprises a nucleic acid sequence encoding a nuclear export signal (NES), to target RNA in the cytoplasm. Other localization signals can be used (and which are known in the art) to target RNA in organelles, such as mitochondria. In other embodiments, the nucleic acid molecule does not comprise a nucleic acid sequence encoding an localization signal, to target RNA in the cytoplasm. In one embodiment, the nucleic acid molecule comprises a nucleic acid sequence encoding a purification and/or detection tag.

[0132] The present disclosure also provides targeting nucleic acids, including CRISPR RNAs (crRNAs), for targeting the protein of the disclosure to a target RNA.

[0133] In one aspect, the present disclosure novel nucleic acid molecules encoding editing proteins which provide targeted RNA cleavage. In some embodiment, the nucleic acid molecule comprises a nucleic acid sequence encoding a localization signal. In one embodiment, the localization signal localizes the protein to the site in which a target RNA is located. Thus, the disclosure provides nucleic acid molecules encoding proteins for targeted RNA cleavage which are capable of localization.

[0134] Editing Protein

[0135] In one embodiment, the nucleic acid molecule comprises a sequence nucleic acid encoding an editing protein. In one embodiment, the editing protein includes, but is not limited to, a CRISPR-associated (Cas) protein, a zinc finger nuclease (ZFN) protein, and a protein having a DNA or RNA binding domain.

[0136] Non-limiting examples of Cas proteins include Cas1, Cas1B, Cas2, Cas3, Cas4, Cas5, Cas6, Cas7, Cas8, Cas9, Cas10, Csy1, Csy2, Csy3, Cse1, Cse2, Csc1, Csc2, Csa5, Csn2. Csm2, Csm3, Csm4, Csm5, Csm6, Cmr1, Cmr3, Cmr4, Cmr5, Cmr6, Csb1, Csb2, Csb3, Csx17, Csx14, Csx10, Csx16, CsaX, Csx3, Csx1, Csx15, Csf1, Csf2, Csf3, Csf4, SpCas9, StCas9, NmCas9, SaCas9, CjCas9, CjCas9, AsCpf1, LbCpf1, FnCpf1, VRER SpCas9, VQR SpCas9, xCas9 3.7, homologs thereof, orthologs thereof, or modified versions thereof. In some embodiments, the Cas protein has DNA or RNA cleavage activity. In some embodiments, the Cas protein directs cleavage of one or both strands of a nucleic acid molecule at the location of a target sequence, such as within the target sequence and/or within the complement of the target sequence. In some embodiments, the Cas protein directs cleavage of one or both strands within about 1, 2, 3, 4, 5, 6, 7, 8, 9, 10, 15, 20, 25, 50, 100, 200, 500, or more base pairs from the first or last nucleotide of a target sequence. In one embodiment, the Cas protein is Cas9, Cas13, or Cpf1. In one embodiment, Cas protein is catalytically deficient (dCas).

[0137] In one embodiment, the Cas protein has RNA binding activity. In one embodiment, Cas protein is Cas13. In one embodiment, the Cas protein is PspCas13b, PspCas13b Truncation, AdmCas13d, AspCas13b, AspCas13c, BmaCas13a, BzoCas13b, CamCas13a, CcaCas13b, Cga2Cas13a, CgaCas13a, EbaCas13a, EreCas13a, EsCas13d, FbrCas13b, FnbCas13c, FndCas13c, FnfCas13c, FnsCas13c, FpeCas13c, FulCas13c, HheCas13a, LbfCas13a, LbmCas13a, LbnCas13a, LbuCas13a, LseCas13a, LshCas13a, LspCas13a, Lwa2cas13a, LwaCas13a, LweCas13a, PauCas13b, PbuCas13b, PgiCas13b, PguCas13b, Pin2Cas13b, Pin3Cas13b, PinCas13b, Pprcas13a, PsaCas13b, PsmCas13b, RaCas13d, RanCas13b, RcdCas13a, RcrCas13a, RcsCas13a, RfxCas13d, UrCas13d, dPspCas13b, PspCas13b_A133H, PspCas13b_A1058H, dPspCas13b truncation, dAdmCas13d, dAspCas13b, dAspCas13c, dBmaCas13a, dBzoCas13b, dCamCas13a, dCcaCas13b, dCga2Cas13a, dCgaCas13a, dEbaCas13a, dEreCas13a, dEsCas13d, dFbrCas13b, dFnbCas13c, dFndCas13c, dFnfCas13c, dFnsCas13c, dFpeCas13c, dFulCas13c, dHheCas13a, dLbfCas13a, dLbmCas13a, dLbnCas13a, dLbuCas13a, dLseCas13a, dLshCas13a, dLspCas13a, dLwa2cas13a, dLwaCas13a, dLweCas13a, dPauCas13b, dPbuCas13b, dPgiCas13b, dPguCas13b, dPin2Cas13b, dPin3Cas13b, dPinCas13b, dPprCas13a, dPsaCas13b, dPsmCas13b, dRaCas13d, dRanCas13b, dRcdCas13a, dRcrCas13a, dRcsCas13a, dRfxCas13d, or dUrCas13d. Additional Cas proteins are known in the art (e.g., Konermann et al., Cell, 2018, 173:665-676 e14, Yan et al., Mol Cell, 2018, 7:327-339 e5; Cox, D. B. T., et al., Science, 2017, 358: 1019-1027; Abudayyeh et al., Nature, 2017, 550: 280-284, Gootenberg et al., Science, 2017, 356: 438-442; and East-Seletsky et al., Mol Cell, 2017, 66: 373-383 e3, which are herein incorporated by reference).

[0138] In one embodiment, the nucleic acid sequence encoding a Cas protein comprises a nucleic acid sequence encoding an amino acid sequence at least 70%, at least 71%, at least 72%, at least 73%, at least 74%, at least 75%, at least 76%, at least 77%, at least 78%, at least 79%, at least 80%, at least 81%, at least 82%, at least 83%, at least 84%, at least 85%, at least 86%, at least 87%, at least 88%, at least 89%, at least 90%, at least 91%, at least 92%, at least 93%, at least 94%, at least 95%, at least 96%, at least 97%, at least 98%, or at least 99% identical to one of SEQ ID NOs: 1-49. In one embodiment, the nucleic acid sequence encoding a Cas protein comprises a nucleic acid sequence encoding an amino acid sequence of one of SEQ ID NOs:1-49. In one embodiment, the nucleic acid sequence encoding a Cas protein comprises a nucleic acid sequence encoding an amino acid sequence of one of SEQ ID NOs:1-47.

[0139] In one embodiment, the nucleic acid sequence encoding a Cas protein comprises a nucleic acid sequence at least 70%, at least 71%, at least 72%, at least 73%, at least 74%, at least 75%, at least 76%, at least 77%, at least 78%, at least 79%, at least 80%, at least 81%, at least 82%, at least 83%, at least 84%, at least 85%, at least 86%, at least 87%, at least 88%, at least 89%, at least 90%, at least 91%, at least 92%, at least 93%, at least 94%, at least 95%, at least 96%, at least 97%, at least 98%, or at least 99% identical to one of SEQ ID NOs: 132-135. In one embodiment, the nucleic acid sequence encoding a Cas protein comprises a nucleic acid sequence of one of SEQ ID NOs: 132-135. In one embodiment, the nucleic acid sequence encoding a Cas protein comprises a nucleic acid sequence of one of SEQ ID NOs:132 or 133.

[0140] Localization Signal

[0141] In some embodiments, the nucleic acid molecule comprises a nucleic acid sequence encoding a localization signal, such as a nuclear localization signal (NLS), nuclear export signal (NES) or other localization signals to localize to the cytoplasm or to organelles, such as mitochondria. In one embodiment, the localization signal localizes the protein to the site in which the target RNA is located.

[0142] Nuclear Localization Signal

[0143] In one embodiment, the nucleic acid molecule comprises a nucleic acid sequence encoding a nuclear localization signal (NLS). In one embodiment, the NLS is a retrotransposon NLS. In one embodiment, the NLS is derived from Ty1, yeast GAL4, SKI3, L29 or histone H2B proteins, polyoma virus large T protein, VP1 or VP2 capsid protein, SV40 VP1 or VP2 capsid protein, Adenovirus E1 a or DBP protein, influenza virus NS1 protein, hepatitis vims core antigen or the mammalian lamin, c-myc, max, c-myb, p53, c-erbA, jun, Tax, steroid receptor or Mx proteins, Nucleoplasmin (NPM2), Nucleophosmin (NPM1), or simian vims 40 (“SV40”) T-antigen.

[0144] In one embodiment, the NLS is a Ty1 or Ty1-derived NLS, a Ty2 or Ty2-derived NLS or a MAK11 or MAK11-derived NLS. In one embodiment, the Ty1 NLS comprises an amino acid sequence of SEQ ID NO:50. In one embodiment, the Ty2 NLS comprises an amino acid sequence of SEQ ID NO:51. In one embodiment, the MAK11 NLS comprises an amino acid sequence of SEQ ID NO:52. In one embodiment, the nucleic acid sequence encoding a NLS comprises a nucleic acid sequence encoding an amino acid sequence at least 70%, at least 71%, at least 72%, at least 73%, at least 74%, at least 75%, at least 76%, at least 77%, at least 78%, at least 79%, at least 80%, at least 81%, at least 82%, at least 83%, at least 84%, at least 85%, at least 86%, at least 87%, at least 88%, at least 89%, at least 90%, at least 91%, at least 92%, at least 93%, at least 94%, at least 95%, at least 96%, at least 97%, at least 98%, or at least 99% identical to one of SEQ ID NOs: 50-57 and 323-935. In one embodiment, the nucleic acid sequence encoding a NLS comprises a nucleic acid sequence encoding an amino acid sequence of one of SEQ ID NOs: 50-57 and 323-935.

[0145] In one embodiment, the NLS is a Ty1-like NLS. For example, in one embodiment, the Ty1-like NLS comprises KKRX motif. In one embodiment, the Ty1-like NLS comprises KKRX motif at the N-terminal end. In one embodiment, the Ty1-like NLS comprises KKR motif. In one embodiment, the Ty1-like NLS comprises KKR motif at the C-terminal end. In one embodiment, the Ty1-like NLS comprises a KKRX and a KKR motif. In one embodiment, the Ty1-like NLS comprises a KKRX at the N-terminal end and a KKR motif at the C-terminal end. In one embodiment, the Ty1-like NLS comprises at least 20 amino acids. In one embodiment, the Ty1-like NLS comprises between 20 and 40 amino acids. In one embodiment, the nucleic acid sequence encoding a Ty1-like NLS comprises a nucleic acid sequence encoding an amino acid sequence at least 70%, at least 71%, at least 72%, at least 73%, at least 74%, at least 75%, at least 76%, at least 77%, at least 78%, at least 79%, at least 80%, at least 81%, at least 82%, at least 83%, at least 84%, at least 85%, at least 86%, at least 87%, at least 88%, at least 89%, at least 90%, at least 91%, at least 92%, at least 93%, at least 94%, at least 95%, at least 96%, at least 97%, at least 98%, or at least 99% identical to one of SEQ ID NOs: 323-935. In one embodiment, the nucleic acid sequence encoding a Ty1-like NLS comprises a nucleic acid sequence encoding an amino acid sequence of one of SEQ ID NOs: 323-935, wherein the sequence comprises one or more, two or more, three or more, four or more, five or more, six or more, seven or more, eight or more, nine or more, or ten or more, insertions, deletions or substitutions. In one embodiment, the nucleic acid sequence encoding a Ty1-like NLS comprises a nucleic acid sequence encoding an amino acid sequence of one of SEQ ID NOs: 323-935.

[0146] In one embodiment, the nucleic acid sequence encoding an NLS encodes two copies of the same NLS. For example, in one embodiment, the nucleic acid sequence encodes a multimer of a first Ty1-derived NLS and a second Ty1-derived NLS.

[0147] In one embodiment, the nucleic acid sequence encoding a NLS comprises a nucleic acid sequence at least 70%, at least 71%, at least 72%, at least 73%, at least 74%, at least 75%, at least 76%, at least 77%, at least 78%, at least 79%, at least 80%, at least 81%, at least 82%, at least 83%, at least 84%, at least 85%, at least 86%, at least 87%, at least 88%, at least 89%, at least 90%, at least 91%, at least 92%, at least 93%, at least 94%, at least 95%, at least 96%, at least 97%, at least 98%, or at least 99% identical to SEQ ID NO:136. In one embodiment, the nucleic acid sequence encoding a NLS comprises a nucleic acid sequence of SEQ ID NO: 136.

[0148] Nuclear Export Signal

[0149] In one embodiment, the nucleic acid molecule comprises a nucleic acid sequence encoding a Nuclear Export Signal (NES). In one embodiment, the NES localizes the protein to the cytoplasm for targeting cytoplasmic RNA. In one embodiment, the nucleic acid sequence encoding the NES comprises a sequence encoding an amino acid sequence at least 70%, at least 71%, at least 72%, at least 73%, at least 74%, at least 75%, at least 76%, at least 77%, at least 78%, at least 79%, at least 80%, at least 81%, at least 82%, at least 83%, at least 84%, at least 85%, at least 86%, at least 87%, at least 88%, at least 89%, at least 90%, at least 91%, at least 92%, at least 93%, at least 94%, at least 95%, at least 96%, at least 97%, at least 98%, or at least 99% identical to SEQ ID NOs: 58 or 59. In one embodiment, the nucleic acid sequence encoding the NES comprises a sequence encoding an amino acid sequence of SEQ ID NOs: 58 or 59.

[0150] In one embodiment, the nucleic acid sequence encoding the NES comprises a sequence at least 70%, at least 71%, at least 72%, at least 73%, at least 74%, at least 75%, at least 76%, at least 77%, at least 78%, at least 79%, at least 80%, at least 81%, at least 82%, at least 83%, at least 84%, at least 85%, at least 86%, at least 87%, at least 88%, at least 89%, at least 90%, at least 91%, at least 92%, at least 93%, at least 94%, at least 95%, at least 96%, at least 97%, at least 98%, or at least 99% identical to SEQ ID NOs: 137 or 138. In one embodiment, the nucleic acid sequence encoding the NES comprises a sequence of SEQ ID NOs: 137 or 138.

[0151] Organelle Localization Signal

[0152] In one embodiment, the nucleic acid molecule comprises a nucleic acid sequence encoding a localization signal that localizes the protein to an organelle or extracellularly. In one embodiment, the localization signal localizes the protein to the nucleolus, ribosome, vesicle, rough endoplasmic reticulum, Golgi apparatus, cytoskeleton, smooth endoplasmic reticulum, mitochondria, vacuole, cytosol, lysosome, or centriole. A number of localization signals are known in the art.

[0153] Exemplary localization signals include, but are not limited to 1× mitochondrial targeting sequence, 4× mitochondrial targeting sequence, secretory signal sequence (IL-2), myristylation, Calsequestrin leader, KDEL retention and peroxisome targeting sequence.

[0154] In one embodiment, the nucleic acid molecule comprises a nucleic acid sequence encoding a localization signal. In one embodiment, the localization signal localizes the protein to an organelle or extracellularly. In one embodiment, the nucleic acid sequence encoding the localization signal comprises a sequence encoding an amino acid sequence at least 70%, at least 71%, at least 72%, at least 73%, at least 74%, at least 75%, at least 76%, at least 77%, at least 78%, at least 79%, at least 80%, at least 81%, at least 82%, at least 83%, at least 84%, at least 85%, at least 86%, at least 87%, at least 88%, at least 89%, In one embodiment, the nucleic acid molecule comprises a nucleic acid sequence encoding a localization signal. In one embodiment, the localization signal localizes the protein to an organelle or extracellularly. In one embodiment, the nucleic acid sequence encoding the localization signal comprises a sequence encoding an amino acid sequence at least 70%, at least 71%, at least 72%, at least 73%, at least 74%, at least 75%, at least 76%, at least 77%, at least 78%, at least 79%, at least 80%, at least 81%, at least 82%, at least 83%, at least 84%, at least 85%, at least 86%, at least 87%, at least 88%, at least 89%, at least 90%, at least 91%, at least 92%, at least 93%, at least 94%, at least 95%, at least 96%, at least 97%, at least 98%, or at least 99% identical to one of SEQ ID NOs: 60-66. In one embodiment, the nucleic acid sequence encoding the localization signal comprises a sequence encoding an amino acid sequence of one of SEQ ID NOs: 60-66.

[0155] In one embodiment, the nucleic acid sequence encoding the localization signal comprises a sequence at least 70%, at least 71%, at least 72%, at least 73%, at least 74%, at least 75%, at least 76%, at least 77%, at least 78%, at least 79%, at least 80%, at least 81%, at least 82%, at least 83%, at least 84%, at least 85%, at least 86%, at least 87%, at least 88%, at least 89%, at least 90%, at least 91%, at least 92%, at least 93%, at least 94%, at least 95%, at least 96%, at least 97%, at least 98%, or at least 99% identical to one of SEQ ID NOs:139-145. In one embodiment, the nucleic acid sequence encoding the localization signal comprises a sequence of one of SEQ ID NOs: 139-145.

[0156] Purification and/or Detection Tag

[0157] In one embodiment, the nucleic acid molecule comprises a nucleic acid sequence encoding a purification and/or detection tag. In one embodiment, the tag is on the N-terminal end of the protein. In one embodiment, the tag is a 3×FLAG tag. In one embodiment, nucleic acid sequence encoding a purification and/or detection tag encodes an amino acid sequence at least 70%, at least 71%, at least 72%, at least 73%, at least 74%, at least 75%, at least 76%, at least 77%, at least 78%, at least 79%, at least 80%, at least 81%, at least 82%, at least 83%, at least 84%, at least 85%, at least 86%, at least 87%, at least 88%, at least 89%, at least 90%, at least 91%, at least 92%, at least 93%, at least 94%, at least 95%, at least 96%, at least 97%, at least 98%, or at least 99% identical to SEQ ID NO:67. In one embodiment, nucleic acid sequence encoding a purification and/or detection tag encodes an amino acid sequence of SEQ ID NO:67.

[0158] In one embodiment, nucleic acid sequence encoding a purification and/or detection tag comprises sequence at least 70%, at least 71%, at least 72%, at least 73%, at least 74%, at least 75%, at least 76%, at least 77%, at least 78%, at least 79%, at least 80%, at least 81%, at least 82%, at least 83%, at least 84%, at least 85%, at least 86%, at least 87%, at least 88%, at least 89%, at least 90%, at least 91%, at least 92%, at least 93%, at least 94%, at least 95%, at least 96%, at least 97%, at least 98%, or at least 99% identical to SEQ ID NO:146. In one embodiment, nucleic acid sequence encoding a purification and/or detection tag comprises a sequence of SEQ ID NO: 146.

[0159] Cleavage and/or Polyadenylation Proteins

[0160] In one aspect, In one embodiment, the nucleic acid molecule comprises a nucleic acid sequence encoding a cleavage and/or polyadenylation protein. In one embodiment, the cleavage and/or polyadenylation protein is an RNA binding protein of the human 3′ end processing machinery. In one embodiment, the cleavage and/or polyadenylation protein is CPSF30, WDR33, or NUDT21. In one embodiment, the cleavage and/or polyadenylation protein is NUDT21. In one embodiment, the cleavage and/or polyadenylation protein is NUDT21, a NUDT21 mutation, a NUDT21 dimer, a NUDT21 fusion protein or any combination thereof. In one embodiment, the cleavage and/or polyadenylation protein is human NUDT21, Worm NUDT21, Fly NUDT21, Zebrafish NUDT21, NUDT21_R63S, NUDT21_F103A, or a tandem dimer of NUDT21.

[0161] In one embodiment, the nucleic acid sequence encoding the cleavage and/or polyadenylation protein encodes an amino acid sequence at least 70%, at least 71%, at least 72%, at least 73%, at least 74%, at least 75%, at least 76%, at least 77%, at least 78%, at least 79%, at least 80%, at least 81%, at least 82%, at least 83%, at least 84%, at least 85%, at least 86%, at least 87%, at least 88%, at least 89%, 90%, at least 91%, at least 92%, at least 93%, at least 94%, at least 95%, at least 96%, at least 97%, at least 98%, or at least 99% identical to one of SEQ ID NOs:298-307. In one embodiment, the nucleic acid sequence encoding the cleavage and/or polyadenylation protein encodes amino acid sequence of one of SEQ ID NOs: 298-307.

[0162] In one embodiment, nucleic acid sequence encoding a cleavage and/or polyadenylation protein comprises sequence at least 70%, at least 71%, at least 72%, at least 73%, at least 74%, at least 75%, at least 76%, at least 77%, at least 78%, at least 79%, at least 80%, at least 81%, at least 82%, at least 83%, at least 84%, at least 85%, at least 86%, at least 87%, at least 88%, at least 89%, at least 90%, at least 91%, at least 92%, at least 93%, at least 94%, at least 95%, at least 96%, at least 97%, at least 98%, or at least 99% identical to SEQ ID NO:311-319. In one embodiment, nucleic acid sequence encoding a cleavage and/or polyadenylation protein comprises a sequence of SEQ ID NO:311-319.

[0163] Fusion Proteins

[0164] Fusion Protein Comprising a Cas Protein and Localization Signal

[0165] In one embodiment, the nucleic acid molecule comprises a nucleic acid sequence encoding a protein of the disclosure, which is effectively delivered to the nucleus, an organelle, the cytoplasm or extracellularly and allow for targeted RNA cleavage. In one embodiment, the nucleic acid sequence encoding a protein encodes an amino acid sequence at least 70%, at least 71%, at least 72%, at least 73%, at least 74%, at least 75%, at least 76%, at least 77%, at least 78%, at least 79%, at least 80%, at least 81%, at least 82%, at least 83%, at least 84%, at least 85%, at least 86%, at least 87%, at least 88%, at least 89%, at least 90%, at least 91%, at least 92%, at least 93%, at least 94%, at least 95%, at least 96%, at least 97%, at least 98%, or at least 99% identical to one of SEQ ID NOs: 68-100. In one embodiment, the nucleic acid sequence encoding a protein encodes an amino acid sequence of one of SEQ ID NOs: 68-100.

[0166] In one embodiment, the nucleic acid sequence encoding a protein comprises a sequence at least 70%, at least 71%, at least 72%, at least 73%, at least 74%, at least 75%, at least 76%, at least 77%, at least 78%, at least 79%, at least 80%, at least 81%, at least 82%, at least 83%, at least 84%, at least 85%, at least 86%, at least 87%, at least 88%, at least 89%, at least 90%, at least 91%, at least 92%, at least 93%, at least 94%, at least 95%, at least 96%, at least 97%, at least 98%, or at least 99% identical to one of SEQ ID NOs: 147-166. In one embodiment, the nucleic acid sequence encoding a protein comprises a sequence of one of SEQ ID NOs: 147-166.

[0167] Fusion Protein Comprising a Cas Protein and a Cleavage and/or Polyadenylation Protein

[0168] In one embodiment, the nucleic acid molecule comprises a nucleic acid sequence encoding a protein of the disclosure, which allow for targeted RNA cleavage and/or polyadenylation. In one embodiment, the nucleic acid sequence encoding a protein encodes an amino acid sequence at least 70%, at least 71%, at least 72%, at least 73%, at least 74%, at least 75%, at least 76%, at least 77%, at least 78%, at least 79%, at least 80%, at least 81%, at least 82%, at least 83%, at least 84%, at least 85%, at least 86%, at least 87%, at least 88%, at least 89%, at least 90%, at least 91%, at least 92%, at least 93%, at least 94%, at least 95%, at least 96%, at least 97%, at least 98%, or at least 99% identical to one of SEQ ID NOs:308-310. In one embodiment, the nucleic acid sequence encoding a protein encodes an amino acid sequence of one of SEQ ID NOs: 308-310.

[0169] In one embodiment, the nucleic acid sequence encoding a protein comprises a sequence at least 70%, at least 71%, at least 72%, at least 73%, at least 74%, at least 75%, at least 76%, at least 77%, at least 78%, at least 79%, at least 80%, at least 81%, at least 82%, at least 83%, at least 84%, at least 85%, at least 86%, at least 87%, at least 88%, at least 89%, at least 90%, at least 91%, at least 92%, at least 93%, at least 94%, at least 95%, at least 96%, at least 97%, at least 98%, or at least 99% identical to one of SEQ ID NOs: 320-322. In one embodiment, the nucleic acid sequence encoding a protein comprises a sequence of one of SEQ ID NOs: 320-322.

[0170] Targeting Nucleic Acids and CRISPR RNAs (crRNAs)

[0171] In one aspect, the disclosure provides CRISPR RNAs (crRNAs) for targeting Cas to a target RNA. In one embodiment, crRNA comprises guide sequence. In one embodiment, the crRNA comprises a direct repeat (DR) sequence. In one embodiment the crRNA comprises a direct repeat sequence and a guide sequence fused or linked to a guide sequence or spacer sequence. In one embodiment the direct repeat sequence may be located upstream (i.e., 5′) from the guide sequence or spacer sequence. In other embodiments, the direct repeat sequence may be located downstream (i.e., 3′) from the guide sequence or spacer sequence.

[0172] In some embodiments, the crRNA comprises a stem loop. In one embodiment, the crRNA comprises a single stem loop. In one embodiment, the direct repeat sequence forms a stem loop. In one embodiment, the direct repeat sequence forms a single stem loop.

[0173] In one embodiment, the spacer length of the guide RNA is from 15 to 35 nt. In one embodiment, the spacer length of the guide RNA is at least 15 nucleotides. In one embodiment the spacer length is from 15 to 17 nt, e.g., 15, 16, or 17 nt, from 17 to 20 nt, e.g., 17, 18, 19, or 20 nt, from 20 to 24 nt, e.g., 20, 21, 22, 23, or 24 nt, from 23 to 25 nt, e.g., 23, 24, or 25 nt, from 24 to 27 nt, e.g., 24, 25, 26, or 27 nt, from 27-30 nt, e.g., 27, 28, 29, or 30 nt, from 30-35 nt, e.g., 30, 31, 32, 33, 34, or 35 nt, or 35 nt or longer.

[0174] In general, a guide sequence is any polynucleotide sequence having sufficient complementarity with a target polynucleotide sequence to hybridize with the target sequence and direct sequence-specific binding of a CRISPR complex to the target sequence. In some embodiments, the degree of complementarity between a guide sequence and its corresponding target sequence, when optimally aligned using a suitable alignment algorithm, is about or more than about 50%, 60%, 75%, 80%, 85%, 90%, 95%, 97.5%, 99%, or more. Optimal alignment may be determined with the use of any suitable algorithm for aligning sequences, non-limiting example of which include the Smith-Waterman algorithm, the Needleman-Wunsch algorithm, algorithms based on the Burrows-Wheeler Transform (e.g. the Burrows Wheeler Aligner), ClustalW, Clustal X, BLAT, Novoalign (Novocraft Technologies; available at www.novocraft.com), ELAND (Illumina, San Diego, Calif.), SOAP (available at soap.genomics.org.cn), and Maq (available at maq.sourceforge.net). In some embodiments, a guide sequence is about or more than about 5, 10, 11, 12, 13, 14, 15, 16, 17, 18, 19, 20, 21, 22, 23, 24, 25, 26, 27, 28, 29, 30, 35, 40, 45, 50, 75, or more nucleotides in length. In some embodiments, a guide sequence is less than about 75, 50, 45, 40, 35, 30, 25, 20, 15, 12, or fewer nucleotides in length. Preferably the guide sequence is 10 30 nucleotides long. The ability of a guide sequence to direct sequence-specific binding of a CRISPR complex to a target sequence may be assessed by any suitable assay. For example, the components of a CRISPR system sufficient to form a CRISPR complex, including the guide sequence to be tested, may be provided to a host cell having the corresponding target sequence, such as by transfection with vectors encoding the components of the CRISPR sequence, followed by an assessment of preferential cleavage within the target sequence, such as by Surveyor assay as described herein. Similarly, cleavage of a target polynucleotide sequence may be evaluated in a test tube by providing the target sequence, components of a CRISPR complex, including the guide sequence to be tested and a control guide sequence different from the test guide sequence, and comparing binding or rate of cleavage at the target sequence between the test and control guide sequence reactions. Other assays are possible, and will occur to those skilled in the art.

[0175] In some embodiments of CRISPR-Cas systems, the degree of complementarity between a guide sequence and its corresponding target sequence can be about or more than about 50%, 60%, 75%, 80%, 85%, 90%, 95%, 97.5%, 99%, or 100%; a guide or RNA or sgRNA can be about or more than about 5, 10, 11, 12, 13, 14, 15, 16, 17, 18, 19, 20, 21, 22, 23, 24, 25, 26, 27, 28, 29, 30, 35, 40, 45, 50, 75, or more nucleotides in length; or guide or RNA or sgRNA can be less than about 75, 50, 45, 40, 35, 30, 25, 20, 15, 12, or fewer nucleotides in length; and advantageously tracr RNA is 30 or 50 nucleotides in length. However, an aspect of the disclosure is to reduce off-target interactions, e.g., reduce the guide interacting with a target sequence having low complementarity. Indeed, in the examples, it is shown that the disclosure involves mutations that result in the CRISPR-Cas system being able to distinguish between target and off-target sequences that have greater than 80% to about 95% complementarity, e.g., 83%-84% or 88-89% or 94-95% complementarity (for instance, distinguishing between a target having 18 nucleotides from an off-target of 18 nucleotides having 1, 2 or 3 mismatches). Accordingly, in the context of the present disclosure the degree of complementarity between a guide sequence and its corresponding target sequence is greater than 94.5% or 95% or 95.5% or 96% or 96.5% or 97% or 97.5% or 98% or 98.5% or 99% or 99.5% or 99.9%, or 100%. Off target is less than 100% or 99.9% or 99.5% or 99% or 99% or 98.5% or 98% or 97.5% or 97% or 96.5% or 96% or 95.5% or 95% or 94.5% or 94% or 93% or 92% or 91% or 90% or 89% or 88% or 87% or 86% or 85% or 84% or 83% or 82% or 81% or 80% complementarity between the sequence and the guide, with it advantageous that off target is 100% or 99.9% or 99.5% or 99% or 99% or 98.5% or 98% or 97.5% or 97% or 96.5% or 96% or 95.5% or 95% or 94.5% complementarity between the sequence and the guide.

[0176] In one embodiment, the crRNA comprises a sequence substantially complementary to a viral RNA sequence. In one embodiment, the crRNA comprises a sequence substantially complementary to a Coronavirus genomic mRNA sequence or a Coronavirus subgenomic mRNA sequence. For example, in one embodiment, the crRNA comprises a sequence substantially complementary to a Coronavirus leader sequence, S sequence, E sequence, M sequence, N sequence, or S2M sequence. In one embodiment, the crRNA comprises a sequence substantially complementary to a Coronavirus leader sequence, N sequence, or S2M sequence.

[0177] In one embodiment, the crRNA comprises a sequence that is substantially complementary to a sequence at least 70%, at least 71%, at least 72%, at least 73%, at least 74%, at least 75%, at least 76%, at least 77%, at least 78%, at least 79%, at least 80%, at least 81%, at least 82%, at least 83%, at least 84%, at least 85%, at least 86%, at least 87%, at least 88%, at least 89%, at least 90%, at least 91%, at least 92%, at least 93%, at least 94%, at least 95%, at least 96%, at least 97%, at least 98%, or at least 99% homologous to a sequence selected from SEQ ID NOs: 167-187, or a fragment thereof. In one embodiment, the crRNA comprises a sequence that is substantially complementary to a sequence selected from SEQ ID NOs: 167-187, or a fragment thereof.

[0178] In one embodiment, the crRNA comprises a sequence that is substantially complementary to a sequence at least 70%, at least 71%, at least 72%, at least 73%, at least 74%, at least 75%, at least 76%, at least 77%, at least 78%, at least 79%, at least 80%, at least 81%, at least 82%, at least 83%, at least 84%, at least 85%, at least 86%, at least 87%, at least 88%, at least 89%, at least 90%, at least 91%, at least 92%, at least 93%, at least 94%, at least 95%, at least 96%, at least 97%, at least 98%, or at least 99% homologous to a fragment of a sequence selected from SEQ ID NOs: 167, 175, or 182-185. In one embodiment, the crRNA comprises a sequence that is substantially complementary to a fragment of a sequence selected from SEQ ID NOs: 167, 175, or 182-185.

[0179] In one embodiment, the crRNA comprises a sequence that is substantially complementary to a sequence at least 70%, at least 71%, at least 72%, at least 73%, at least 74%, at least 75%, at least 76%, at least 77%, at least 78%, at least 79%, at least 80%, at least 81%, at least 82%, at least 83%, at least 84%, at least 85%, at least 86%, at least 87%, at least 88%, at least 89%, at least 90%, at least 91%, at least 92%, at least 93%, at least 94%, at least 95%, at least 96%, at least 97%, at least 98%, or at least 99% homologous to a sequence selected from SEQ ID NOs: 168-174, 176-181, 186, and 187. In one embodiment, the crRNA comprises a sequence that is substantially complementary to a sequence selected from SEQ ID NOs: 168-174, 176-181, 186, and 187.

[0180] In one embodiment, the crRNA comprises a sequence at least 70%, at least 71%, at least 72%, at least 73%, at least 74%, at least 75%, at least 76%, at least 77%, at least 78%, at least 79%, at least 80%, at least 81%, at least 82%, at least 83%, at least 84%, at least 85%, at least 86%, at least 87%, at least 88%, at least 89%, at least 90%, at least 91%, at least 92%, at least 93%, at least 94%, at least 95%, at least 96%, at least 97%, at least 98%, or at least 99% homologous to a sequence selected from SEQ ID NOs: 189-224. In one embodiment, the crRNA comprises a sequence selected from SEQ ID NOs: 189-224.

[0181] In one embodiment, the disclosure provides crRNA having a sequence substantially complementary to an influenza virus sequence. In one embodiment, the crRNA comprises a substantially complementary to an influenza virus genomic mRNA sequence or a subgenomic mRNA sequence. For example, in one embodiment, the crRNA comprises a sequence substantially complementary to an Influenza virus PB2 sequence, PB1 sequence, PA sequence, HA sequence, NP sequence, NA sequence, M sequence or NS sequence. In one embodiment, the crRNA comprises a sequence substantially complementary to an Influenza virus PB2 sequence, PB1 sequence, PA sequence, NP sequence, or M sequence.

[0182] In one embodiment, the crRNA comprises a sequence that is substantially complementary to a sequence at least 70%, at least 71%, at least 72%, at least 73%, at least 74%, at least 75%, at least 76%, at least 77%, at least 78%, at least 79%, at least 80%, at least 81%, at least 82%, at least 83%, at least 84%, at least 85%, at least 86%, at least 87%, at least 88%, at least 89%, at least 90%, at least 91%, at least 92%, at least 93%, at least 94%, at least 95%, at least 96%, at least 97%, at least 98%, or at least 99% homologous to a sequence selected from SEQ ID NOs:225-244, or a fragment thereof. In one embodiment, the crRNA comprises a sequence that is substantially complementary to a sequence selected from SEQ ID NOs: 225-244, or a fragment thereof.

[0183] In one embodiment, the crRNA comprises a sequence that is substantially complementary to a viral RNA sequence. In one embodiment, the crRNA comprises a sequence that is substantially complementary to a sequence a positive-sense viral RNA sequence. In one embodiment, the crRNA comprises a sequence that is substantially complementary to a sequence a negative-sense viral RNA sequence. In one embodiment, the crRNA comprises a sequence that at least 70%, at least 71%, at least 72%, at least 73%, at least 74%, at least 75%, at least 76%, at least 77%, at least 78%, at least 79%, at least 80%, at least 81%, at least 82%, at least 83%, at least 84%, at least 85%, at least 86%, at least 87%, at least 88%, at least 89%, at least 90%, at least 91%, at least 92%, at least 93%, at least 94%, at least 95%, at least 96%, at least 97%, at least 98%, or at least 99% homologous to a sequence selected from SEQ ID NOs: 245-264. In one embodiment, the crRNA comprises a sequence selected from SEQ ID NOs: 245-264.

[0184] In one embodiment, the crRNA comprises a direct repeat (DR) sequence. In one embodiment, the DR sequence is 5′ of the sequence substantially complementary to the target sequence. For example, in one embodiment, the DR sequence is 5′ of the sequence substantially complementary to a Coronavirus genomic mRNA sequence or a Coronavirus subgenomic mRNA sequence. In one embodiment, the DR sequence is 5′ of the sequence substantially complementary to an influenza virus genomic RNA sequence or a influenza virus subgenomic RNA sequence. In one embodiment, the DR sequence is 5′ of the sequence substantially complementary to an expanded RNA repeat sequence. In one embodiment, the DR sequence enhances the activity of Cas13 targeting to a target sequence, Cas13 catalytic activity, or both. For example, in one embodiment, the DR sequence comprises a mutation. For example, in one embodiment, the DR sequence comprises a T17C point mutation. In one embodiment, the DR sequence comprises a T18C point mutation. In one embodiment, the DR sequence is 5′ of a sequence at least 80% homologous to a sequence selected from SEQ ID NOs: 189-224 and 245-264.

[0185] In one embodiment, the DR sequence is 3′ of the sequence substantially complementary to the target sequence. For example, in one embodiment, the DR sequence is 3′ of the sequence substantially complementary to a Coronavirus genomic mRNA sequence or a Coronavirus subgenomic mRNA sequence. In one embodiment, the DR sequence is 3′ of the sequence substantially complementary to an Influenza virus genomic mRNA sequence or an Influenza virus subgenomic mRNA sequence. In one embodiment, the DR sequence is 3′ of a sequence at least 70%, at least 71%, at least 72%, at least 73%, at least 74%, at least 75%, at least 76%, at least 77%, at least 78%, at least 79%, at least 80%, at least 81%, at least 82%, at least 83%, at least 84%, at least 85%, at least 86%, at least 87%, at least 88%, at least 89%, at least 90%, at least 91%, at least 92%, at least 93%, at least 94%, at least 95%, at least 96%, at least 97%, at least 98%, or at least 99% homologous to a sequence selected from SEQ ID NOs: 189-224 and 245-264.

[0186] In one embodiment, selection of a 5′ or 3′ DR sequence is dependent on the Cas protein ortholog used. In one embodiment the DR sequence comprises a sequence selected from SEQ ID NOs: 265-274.

[0187] Tandem Arrays

[0188] In one embodiment, the invention provides tandem CRISPR RNA (crRNA) arrays. In one embodiment, the tandem crRNA arrays allow for a single promoter to drive expression of multiple crRNAs. In one embodiment, the tandem array comprises one or more, two or more, three or more, four or more, five or more six or more, seven or more or eight or more crRNA sequences.

[0189] In one embodiment, each crRNA in the tandem crRNA array comprises a direct repeat (DR) sequence and a spacer sequence. In one embodiment the direct repeat sequence may be located upstream (i.e., 5′) from the guide sequence or spacer sequence. In other embodiments, the direct repeat sequence may be located downstream (i.e., 3′) from the guide sequence or spacer sequence.

[0190] In one embodiment, the DR sequence is specific for an associated Cas protein. For example, in one embodiment, the Cas protein is Cas13 and the direct repeat sequence comprises a sequence of one of SEQ ID NOs: 265-274. In one embodiment, the direct repeat sequence includes a single mutation in the poly T stretch. For example, in one embodiment, the direct repeat sequence comprises a sequence selected from SEQ ID NOs: 268-274.

[0191] In one embodiment, each crRNA in the tandem crRNA array comprises a different direct repeat sequence. For example, in one embodiment, nucleotide substitutions within the loop region of the direct repeat, multiple guide-RNAs provides for efficiently generated ordered arrays of crRNAs.

[0192] In one embodiment, the tandem array comprises at least two or more crRNA, wherein each crRNA comprises a sequence substantially complementary to a target RNA. For example, in one embodiment, each crRNA comprises a different sequence substantially complementary to a different sequence in a single target RNA. In one embodiment, each crRNA comprises a different sequence substantially complementary to a different sequence in a different target RNAs. In one embodiment, the different target RNAs are related to a single disease, disorder or infection. For example, in one embodiment, the different target RNAs are each viral RNA sequences of a virus.

[0193] For example, in one embodiment, each crRNA comprises a different sequence substantially complementary to a different sequence within a genomic coronavirus RNA sequence and/or a sub-genomic coronavirus RNA sequence. In one embodiment, the crRNA comprises a substantially complementary to a corona virus genomic mRNA sequence or a Coronavirus subgenomic mRNA sequence. For example, in one embodiment, the crRNA comprises a sequence substantially complementary to a Coronavirus leader sequence, S sequence, E sequence, M sequence, N sequence, or S2M sequence. In one embodiment, the crRNA comprises a sequence substantially complementary to a Coronavirus leader sequence, N sequence, or S2M sequence.

[0194] In one embodiment, the tandem array comprises at least two or more crRNA comprising sequences substantially complementary to a genomic coronavirus RNA sequence and/or a sub-genomic coronavirus RNA sequence. In one embodiment, the tandem array comprises at least two or more crRNA comprising a substantially complementary to a sequence at least 70%, at least 71%, at least 72%, at least 73%, at least 74%, at least 75%, at least 76%, at least 77%, at least 78%, at least 79%, at least 80%, at least 81%, at least 82%, at least 83%, at least 84%, at least 85%, at least 86%, at least 87%, at least 88%, at least 89%, at least 90%, at least 91%, at least 92%, at least 93%, at least 94%, at least 95%, at least 96%, at least 97%, at least 98%, or at least 99% homologous to a sequence selected from SEQ ID NOs: 167-188 or a fragment thereof. In one embodiment, the tandem array comprises at least two or more crRNA comprising a substantially complementary to a sequence selected from SEQ ID NOs: 167-188, or a fragment thereof.

[0195] In one embodiment, the tandem array comprises at least two or more crRNA comprising a substantially complementary to a sequence at least 70%, at least 71%, at least 72%, at least 73%, at least 74%, at least 75%, at least 76%, at least 77%, at least 78%, at least 79%, at least 80%, at least 81%, at least 82%, at least 83%, at least 84%, at least 85%, at least 86%, at least 87%, at least 88%, at least 89%, at least 90%, at least 91%, at least 92%, at least 93%, at least 94%, at least 95%, at least 96%, at least 97%, at least 98%, or at least 99% homologous to a sequence selected from SEQ ID NOs: 168-174, 176-181, 186, and 187. In one embodiment, the tandem array comprises at least two or more crRNA comprising a substantially complementary to a sequence selected from SEQ ID NOs: 168-174, 176-181, 186, and 187.

[0196] In one embodiment, the tandem array comprises at least two or more crRNA comprising a sequence at least 70%, at least 71%, at least 72%, at least 73%, at least 74%, at least 75%, at least 76%, at least 77%, at least 78%, at least 79%, at least 80%, at least 81%, at least 82%, at least 83%, at least 84%, at least 85%, at least 86%, at least 87%, at least 88%, at least 89%, at least 90%, at least 91%, at least 92%, at least 93%, at least 94%, at least 95%, at least 96%, at least 97%, at least 98%, or at least 99% homologous to a sequence selected from SEQ ID NOs: 189-224. In one embodiment, the tandem array comprises at least two or more crRNA comprising a sequence selected from SEQ ID NOs: 189-224.

[0197] In one embodiment, the tandem array comprises a sequence at least 70%, at least 71%, at least 72%, at least 73%, at least 74%, at least 75%, at least 76%, at least 77%, at least 78%, at least 79%, at least 80%, at least 81%, at least 82%, at least 83%, at least 84%, at least 85%, at least 86%, at least 87%, at least 88%, at least 89%, at least 90%, at least 91%, at least 92%, at least 93%, at least 94%, at least 95%, at least 96%, at least 97%, at least 98%, or at least 99% homologous to SEQ ID NO:275. In one embodiment, the tandem array comprises a sequence of SEQ ID NO: 275.

[0198] In one embodiment, the tandem array comprises at least two or more crRNA each independently comprising sequences substantially complementary to an influenza virus sequence. In one embodiment, the tandem array comprises at least two or more crRNA each comprising a sequence substantially complementary to an influenza virus genomic mRNA sequence or a subgenomic mRNA sequence. In one embodiment, the tandem array comprises at least two or more crRNA each comprising a sequence substantially complementary to an Influenza virus PB2 sequence, PB1 sequence, PA sequence, HA sequence, NP sequence, NA sequence, M sequence or NS sequence.

[0199] In one embodiment, the tandem array comprises at least two or more crRNA comprising a substantially complementary to a sequence at least 70%, at least 71%, at least 72%, at least 73%, at least 74%, at least 75%, at least 76%, at least 77%, at least 78%, at least 79%, at least 80%, at least 81%, at least 82%, at least 83%, at least 84%, at least 85%, at least 86%, at least 87%, at least 88%, at least 89%, at least 90%, at least 91%, at least 92%, at least 93%, at least 94%, at least 95%, at least 96%, at least 97%, at least 98%, or at least 99% homologous to a sequence selected from SEQ ID NOs: 225-244 or a fragment thereof. In one embodiment, the tandem array comprises at least two or more crRNA comprising a substantially complementary to a sequence selected from SEQ ID NOs: 225-244, or a fragment thereof.

[0200] In one embodiment, the tandem array comprises at least two or more crRNA comprising a sequence each targeting a different positive sense vRNA segment 1, 2, 3, 5 or 7. In one embodiment, the tandem array comprises at least two or more crRNA comprising a sequence at least 70%, at least 71%, at least 72%, at least 73%, at least 74%, at least 75%, at least 76%, at least 77%, at least 78%, at least 79%, at least 80%, at least 81%, at least 82%, at least 83%, at least 84%, at least 85%, at least 86%, at least 87%, at least 88%, at least 89%, at least 90%, at least 91%, at least 92%, at least 93%, at least 94%, at least 95%, at least 96%, at least 97%, at least 98%, or at least 99% homologous to a sequence selected from SEQ ID NOs: 216-225. In one embodiment, the tandem array comprises at least two or more crRNA comprising a sequence selected from SEQ ID NOs: 245-264. In one embodiment, the tandem array comprises at least two or more crRNA comprising a sequence at least 70%, at least 71%, at least 72%, at least 73%, at least 74%, at least 75%, at least 76%, at least 77%, at least 78%, at least 79%, at least 80%, at least 81%, at least 82%, at least 83%, at least 84%, at least 85%, at least 86%, at least 87%, at least 88%, at least 89%, at least 90%, at least 91%, at least 92%, at least 93%, at least 94%, at least 95%, at least 96%, at least 97%, at least 98%, or at least 99% homologous to a sequence selected from SEQ ID NOs: 255-259. In one embodiment, the tandem array comprises at least two or more crRNA comprising a sequence selected from SEQ ID NOs: 255-259.

[0201] In one embodiment, the tandem array comprises at least two or more crRNA comprising a sequence each targeting a different negative sense vRNA segment 1, 2, 3, 5 or 7. In one embodiment, the tandem array comprises at least two or more crRNA comprising a sequence at least 70%, at least 71%, at least 72%, at least 73%, at least 74%, at least 75%, at least 76%, at least 77%, at least 78%, at least 79%, at least 80%, at least 81%, at least 82%, at least 83%, at least 84%, at least 85%, at least 86%, at least 87%, at least 88%, at least 89%, at least 90%, at least 91%, at least 92%, at least 93%, at least 94%, at least 95%, at least 96%, at least 97%, at least 98%, or at least 99% homologous to a sequence selected from SEQ ID NOs: 245-249. In one embodiment, the tandem array comprises at least two or more crRNA comprising a sequence selected from SEQ ID NOs: 245-249. In one embodiment, the tandem array comprises at least two or more crRNA comprising a sequence at least 70%, at least 71%, at least 72%, at least 73%, at least 74%, at least 75%, at least 76%, at least 77%, at least 78%, at least 79%, at least 80%, at least 81%, at least 82%, at least 83%, at least 84%, at least 85%, at least 86%, at least 87%, at least 88%, at least 89%, at least 90%, at least 91%, at least 92%, at least 93%, at least 94%, at least 95%, at least 96%, at least 97%, at least 98%, or at least 99% homologous to a sequence selected from SEQ ID NOs: 260-264. In one embodiment, the tandem array comprises at least two or more crRNA comprising a sequence selected from SEQ ID NOs: 260-264.

[0202] In one embodiment, the tandem array comprises at least two or more crRNA comprising a sequence at least 70%, at least 71%, at least 72%, at least 73%, at least 74%, at least 75%, at least 76%, at least 77%, at least 78%, at least 79%, at least 80%, at least 81%, at least 82%, at least 83%, at least 84%, at least 85%, at least 86%, at least 87%, at least 88%, at least 89%, at least 90%, at least 91%, at least 92%, at least 93%, at least 94%, at least 95%, at least 96%, at least 97%, at least 98%, or at least 99% homologous to a sequence selected from SEQ ID NOs: 250-254. In one embodiment, the tandem array comprises at least two or more crRNA comprising a sequence selected from SEQ ID NOs: 250-254.

[0203] In one embodiment, the tandem array comprises a sequence at least 70%, at least 71%, at least 72%, at least 73%, at least 74%, at least 75%, at least 76%, at least 77%, at least 78%, at least 79%, at least 80%, at least 81%, at least 82%, at least 83%, at least 84%, at least 85%, at least 86%, at least 87%, at least 88%, at least 89%, at least 90%, at least 91%, at least 92%, at least 93%, at least 94%, at least 95%, at least 96%, at least 97%, at least 98%, or at least 99% homologous to one of SEQ ID NOs: 276-279. In one embodiment, the tandem array comprises a sequence of SEQ ID NOs: 276-279.

[0204] In one embodiment, the tandem array comprises at least two or more crRNA each independently comprising sequences substantially complementary to mRNA sequences within a cellular pathway. In some embodiments, the cellular pathway lead, for example, to aberrant control of cellular processes, with uncontrolled growth and increased cell survival. For example, in one embodiment, each crRNA independently comprises a sequence substantially complementary to an mRNA sequence within the RAS, JAK-STAT, PI3K/AKT ErbB, the p53-mediated apoptosis, GSK3, Hippo, Wnt, Estrogen, Insulin, mTOR, NF-kB, Notch, TGF-β, Toll-like Receptor, VEGF, AMPK or MAPK cellular signaling pathways.

[0205] In one embodiment, the tandem array comprises at least two or more crRNA each independently comprising sequences substantially complementary to mRNA sequences for use in biofuel production in microorganisms or plants, Bioengineering CAR-T cells, silencing stress response pathways, immune cell inflammation pathways. Targeting multiple different types or subtypes of infectious virus.

[0206] In one embodiment, the crRNA comprises a direct repeat (DR) sequence. In one embodiment, the DR sequence is 5′ of the sequence substantially complementary to the target sequence. For example, in one embodiment, the DR sequence is 5′ of the sequence substantially complementary to a Coronavirus genomic mRNA sequence or a Coronavirus subgenomic mRNA sequence. In one embodiment, the DR sequence enhances the activity of Cas13 targeting to a target sequence, Cas13 catalytic activity, or both. For example, in one embodiment, the DR sequence comprises a mutation. For example, in one embodiment, the DR sequence comprises a T17C point mutation. In one embodiment, the DR sequence comprises a T18C point mutation. In one embodiment, the DR sequence comprises a T17A point mutation. In one embodiment, the DR sequence comprises a T18A point mutation. In one embodiment, the DR sequence comprises a T17G point mutation. In one embodiment, the DR sequence comprises a T18G point mutation. In one embodiment, the DR sequence is 5′ of a sequence at least 80% homologous to a sequence selected from SEQ ID NOs: 189-224. In one embodiment, the DR sequence is 3′ of the sequence substantially complementary to the target sequence. For example, in one embodiment, the DR sequence is 3′ of the sequence substantially complementary to a corona virus genomic mRNA sequence or a Coronavirus subgenomic mRNA sequence. In one embodiment, the DR sequence is 3′ of a sequence at least 80% homologous to a sequence selected from SEQ ID NOs: 189-224. In one embodiment, selection of a 5′ or 3′ DR sequence is dependent on the Cas protein ortholog used. In one embodiment the DR sequence comprises a sequence selected from SEQ ID NOs: 265-274.

[0207] In one embodiment, the spacer length of the guide RNA is from 15 to 35 nt. In one embodiment, the spacer length of the guide RNA is at least 15 nucleotides. In one embodiment the spacer length is from 15 to 17 nt, e.g., 15, 16, or 17 nt, from 17 to 20 nt, e.g., 17, 18, 19, or 20 nt, from 20 to 24 nt, e.g., 20, 21, 22, 23, or 24 nt, from 23 to 25 nt, e.g., 23, 24, or 25 nt, from 24 to 27 nt, e.g., 24, 25, 26, or 27 nt, from 27-30 nt, e.g., 27, 28, 29, or 30 nt, from 30-35 nt, e.g., 30, 31, 32, 33, 34, or 35 nt, or 35 nt or longer.

[0208] In general, a “guide sequence,” which is used interchangeably with the term “spacer sequence” is any polynucleotide sequence having sufficient complementarity with a target polynucleotide sequence to hybridize with the target sequence and direct sequence-specific binding of a CRISPR complex to the target sequence. In some embodiments, the degree of complementarity between a guide sequence and its corresponding target sequence, when optimally aligned using a suitable alignment algorithm, is about or more than about 50%, 60%, 75%, 80%, 85%, 90%, 95%, 97.5%, 99%, or more. Optimal alignment may be determined with the use of any suitable algorithm for aligning sequences, non-limiting example of which include the Smith-Waterman algorithm, the Needleman-Wunsch algorithm, algorithms based on the Burrows-Wheeler Transform (e.g. the Burrows Wheeler Aligner), ClustalW, Clustal X, BLAT, Novoalign (Novocraft Technologies; available at www.novocraft.com), ELAND (Illumina, San Diego, Calif.), SOAP (available at soap.genomics.org.cn), and Maq (available at maq.sourceforge.net). In some embodiments, a guide sequence is about or more than about 5, 10, 11, 12, 13, 14, 15, 16, 17, 18, 19, 20, 21, 22, 23, 24, 25, 26, 27, 28, 29, 30, 35, 40, 45, 50, 75, or more nucleotides in length. In some embodiments, a guide sequence is less than about 75, 50, 45, 40, 35, 30, 25, 20, 15, 12, or fewer nucleotides in length. Preferably the guide sequence is 10 30 nucleotides long. The ability of a guide sequence to direct sequence-specific binding of a CRISPR complex to a target sequence may be assessed by any suitable assay. For example, the components of a CRISPR system sufficient to form a CRISPR complex, including the guide sequence to be tested, may be provided to a host cell having the corresponding target sequence, such as by transfection with vectors encoding the components of the CRISPR sequence, followed by an assessment of preferential cleavage within the target sequence, such as by Surveyor assay as described herein. Similarly, cleavage of a target polynucleotide sequence may be evaluated in a test tube by providing the target sequence, components of a CRISPR complex, including the guide sequence to be tested and a control guide sequence different from the test guide sequence, and comparing binding or rate of cleavage at the target sequence between the test and control guide sequence reactions. Other assays are possible, and will occur to those skilled in the art.

[0209] In some embodiments of CRISPR-Cas systems, the degree of complementarity between a guide sequence and its corresponding target sequence can be about or more than about 50%, 60%, 75%, 80%, 85%, 90%, 95%, 97.5%, 99%, or 100%; a guide or RNA or sgRNA can be about or more than about 5, 10, 11, 12, 13, 14, 15, 16, 17, 18, 19, 20, 21, 22, 23, 24, 25, 26, 27, 28, 29, 30, 35, 40, 45, 50, 75, or more nucleotides in length; or guide or RNA or sgRNA can be less than about 75, 50, 45, 40, 35, 30, 25, 20, 15, 12, or fewer nucleotides in length; and advantageously tracr RNA is 30 or 50 nucleotides in length. However, an aspect of the invention is to reduce off-target interactions, e.g., reduce the guide interacting with a target sequence having low complementarity. Indeed, in the examples, it is shown that the invention involves mutations that result in the CRISPR-Cas system being able to distinguish between target and off-target sequences that have greater than 80% to about 95% complementarity, e.g., 83%-84% or 88-89% or 94-95% complementarity (for instance, distinguishing between a target having 18 nucleotides from an off-target of 18 nucleotides having 1, 2 or 3 mismatches). Accordingly, in the context of the present invention the degree of complementarity between a guide sequence and its corresponding target sequence is greater than 94.5% or 95% or 95.5% or 96% or 96.5% or 97% or 97.5% or 98% or 98.5% or 99% or 99.5% or 99.9%, or 100%. Off target is less than 100% or 99.9% or 99.5% or 99% or 99% or 98.5% or 98% or 97.5% or 97% or 96.5% or 96% or 95.5% or 95% or 94.5% or 94% or 93% or 92% or 91% or 90% or 89% or 88% or 87% or 86% or 85% or 84% or 83% or 82% or 81% or 80% complementarity between the sequence and the guide, with it advantageous that off target is 100% or 99.9% or 99.5% or 99% or 99% or 98.5% or 98% or 97.5% or 97% or 96.5% or 96% or 95.5% or 95% or 94.5% complementarity between the sequence and the guide.

[0210] Nucleic Acids

[0211] The isolated nucleic acid sequences of the disclosure can be obtained using any of the many recombinant methods known in the art, such as, for example by screening libraries from cells expressing the gene, by deriving the gene from a vector known to include the same, or by isolating directly from cells and tissues containing the same, using standard techniques. Alternatively, the gene of interest can be produced synthetically, rather than cloned.

[0212] The isolated nucleic acid may comprise any type of nucleic acid, including, but not limited to DNA and RNA. For example, in one embodiment, the composition comprises an isolated DNA molecule, including for example, an isolated cDNA molecule, encoding a protein of the disclosure. In one embodiment, the composition comprises an isolated RNA molecule encoding a protein of the disclosure, or a functional fragment thereof.

[0213] The nucleic acid molecules of the present invention can be modified to improve stability in serum or in growth medium for cell cultures. Modifications can be added to enhance stability, functionality, and/or specificity and to minimize immunostimulatory properties of the nucleic acid molecule of the invention. For example, in order to enhance the stability, the 3′-residues may be stabilized against degradation, e.g., they may be selected such that they consist of purine nucleotides, particularly adenosine or guanosine nucleotides. Alternatively, substitution of pyrimidine nucleotides by modified analogues, e.g., substitution of uridine by 2′-deoxythymidine is tolerated and does not affect function of the molecule.

[0214] In one embodiment of the present invention the nucleic acid molecule may contain at least one modified nucleotide analogue. For example, the ends may be stabilized by incorporating modified nucleotide analogues.

[0215] Non-limiting examples of nucleotide analogues include sugar- and/or backbone-modified ribonucleotides (i.e., include modifications to the phosphate-sugar backbone). For example, the phosphodiester linkages of natural RNA may be modified to include at least one of a nitrogen or sulfur heteroatom. In exemplary backbone-modified ribonucleotides the phosphoester group connecting to adjacent ribonucleotides is replaced by a modified group, e.g., of phosphothioate group. In exemplary sugar-modified ribonucleotides, the 2′ OH-group is replaced by a group selected from H, OR, R, halo, SH, SR, NH₂, NHR, NR₂ or ON, wherein R is C₁-C₆ alkyl, alkenyl or alkynyl and halo is F, Cl, Br or I.

[0216] Other examples of modifications are nucleobase-modified ribonucleotides, i.e., ribonucleotides, containing at least one non-naturally occurring nucleobase instead of a naturally occurring nucleobase. Bases may be modified to block the activity of adenosine deaminase. Exemplary modified nucleobases include, but are not limited to, uridine and/or cytidine modified at the 5-position, e.g., 5-(2-amino)propyl uridine, 5-bromo uridine; adenosine and/or guanosines modified at the 8 position, e.g., 8-bromo guanosine; deaza nucleotides, e.g., 7-deaza-adenosine; O- and N-alkylated nucleotides, e.g., N6-methyl adenosine are suitable. It should be noted that the above modifications may be combined.

[0217] In some instances, the nucleic acid molecule comprises at least one of the following chemical modifications: 2′-H, 2′-O-methyl, or 2′-OH modification of one or more nucleotides. In certain embodiments, a nucleic acid molecule of the invention can have enhanced resistance to nucleases. For increased nuclease resistance, a nucleic acid molecule, can include, for example, 2′-modified ribose units and/or phosphorothioate linkages. For example, the 2′ hydroxyl group (OH) can be modified or replaced with a number of different “oxy” or “deoxy” substituents. For increased nuclease resistance the nucleic acid molecules of the invention can include 2′-O-methyl, 2′-fluorine, 2′-O-methoxyethyl, 2′-O-aminopropyl, 2′-amino, and/or phosphorothioate linkages. Inclusion of locked nucleic acids (LNA), ethylene nucleic acids (ENA), e.g., 2′-4′-ethylene-bridged nucleic acids, and certain nucleobase modifications such as 2-amino-A, 2-thio (e.g., 2-thio-U), G-clamp modifications, can also increase binding affinity to a target.

[0218] In one embodiment, the nucleic acid molecule includes a 2′-modified nucleotide, e.g., a 2′-deoxy, 2′-deoxy-2′-fluoro, 2′-O-methyl, 2′-O-methoxyethyl (2′-O-MOE), 2′-O-aminopropyl (2′-O-AP), 2′-O-dimethylaminoethyl (2′-O-DMAOE), 2′-O-dimethylaminopropyl (2′-O-DMAP), 2′-O-dimethylaminoethyloxyethyl (2′-O-DMAEOE), or 2′-O—N-methylacetamido (2′-O-NMA). In one embodiment, the nucleic acid molecule includes at least one 2′-O-methyl-modified nucleotide, and in some embodiments, all of the nucleotides of the nucleic acid molecule include a 2′-O-methyl modification.

[0219] In certain embodiments, the nucleic acid molecule of the invention has one or more of the following properties:

[0220] Nucleic acid agents discussed herein include otherwise unmodified RNA and DNA as well as RNA and DNA that have been modified, e.g., to improve efficacy, and polymers of nucleoside surrogates. Unmodified RNA refers to a molecule in which the components of the nucleic acid, namely sugars, bases, and phosphate moieties, are the same or essentially the same as that which occur in nature, or as occur naturally in the human body. The art has referred to rare or unusual, but naturally occurring, RNAs as modified RNAs, see, e.g., Limbach et al. (Nucleic Acids Res., 1994, 22:2183-2196). Such rare or unusual RNAs, often termed modified RNAs, are typically the result of a post-transcriptional modification and are within the term unmodified RNA as used herein. Modified RNA, as used herein, refers to a molecule in which one or more of the components of the nucleic acid, namely sugars, bases, and phosphate moieties, are different from that which occur in nature, or different from that which occurs in the human body. While they are referred to as “modified RNAs” they will of course, because of the modification, include molecules that are not, strictly speaking, RNAs. Nucleoside surrogates are molecules in which the ribophosphate backbone is replaced with a non-ribophosphate construct that allows the bases to be presented in the correct spatial relationship such that hybridization is substantially similar to what is seen with a ribophosphate backbone, e.g., non-charged mimics of the ribophosphate backbone.

[0221] Modifications of the nucleic acid of the invention may be present at one or more of, a phosphate group, a sugar group, backbone, N-terminus, C-terminus, or nucleobase.

[0222] The present invention also includes a vector in which the isolated nucleic acid of the present invention is inserted. The art is replete with suitable vectors that are useful in the present invention.

[0223] In brief summary, the expression of natural or synthetic nucleic acids encoding a protein of the disclosure is typically achieved by operably linking a nucleic acid encoding the protein of the disclosure or portions thereof to a promoter, and incorporating the construct into an expression vector. The vectors to be used are suitable for replication and, optionally, integration in eukaryotic cells. Typical vectors contain transcription and translation terminators, initiation sequences, and promoters useful for regulation of the expression of the desired nucleic acid sequence.

[0224] The vectors of the present invention may also be used for nucleic acid immunization and gene therapy, using standard gene delivery protocols. Methods for gene delivery are known in the art. See, e.g., U.S. Pat. Nos. 5,399,346, 5,580,859, 5,589,466, incorporated by reference herein in their entireties. In another embodiment, the invention provides a gene therapy vector.

[0225] The isolated nucleic acid of the invention can be cloned into a number of types of vectors. For example, the nucleic acid can be cloned into a vector including, but not limited to a plasmid, a phagemid, a phage derivative, an animal virus, and a cosmid. Vectors of particular interest include expression vectors, replication vectors, probe generation vectors, and sequencing vectors.

[0226] Further, the vector may be provided to a cell in the form of a viral vector. Viral vector technology is well known in the art and is described, for example, in Sambrook et al. (2012, Molecular Cloning: A Laboratory Manual, Cold Spring Harbor Laboratory, New York), and in other virology and molecular biology manuals. Viruses, which are useful as vectors include, but are not limited to, retroviruses, adenoviruses, adeno-associated viruses, herpes viruses, and lentiviruses. In general, a suitable vector contains an origin of replication functional in at least one organism, a promoter sequence, convenient restriction endonuclease sites, and one or more selectable markers, (e.g., WO 01/96584; WO 01/29058; and U.S. Pat. No. 6,326,193).

### Delivery Systems and Methods

[0227] In one aspect, the disclosure relates to the development of novel lentiviral packaging and delivery systems. The lentiviral particle delivers the viral enzymes as proteins. In this fashion, lentiviral enzymes are short lived, thus limiting the potential for off-target editing due to long term expression though the entire life of the cell. Thus, in one embodiment, the disclosure provides novel delivery systems for delivering a gene or genetic material.

[0228] The incorporation of editing components, or traditional CRISPR-Cas editing components as proteins in lentiviral particles is advantageous, given that their required activity is only required for a short period of time. Thus, in one embodiment, the disclosure provides a lentiviral delivery system and methods of delivering the compositions of the invention, editing genetic material, and nucleic acid delivery using lentiviral delivery systems.

[0229] In one embodiment, the delivery system comprises (1) a packaging plasmid (2) a transfer plasmid, and (3) an envelope plasmid. In one embodiment, the delivery system comprises (1) a packaging plasmid (2) an envelope plasmid, and (3) a VPR plasmid. In one embodiment, the packaging plasmid comprises a nucleic acid sequence encoding a gag-pol polyprotein. In one embodiment, the gag-pol polyprotein comprises catalytically dead integrase. In one embodiment, the gag-pol polyprotein comprises a mutation selected from D116N, D116A, D116E, D64V, D64E, and D64A.

[0230] In one embodiment, the transfer plasmid comprises a nucleic acid sequence encoding a crRNA sequence and Cas protein of the disclosure. For example, in one embodiment the transfer plasmid comprises a nucleic acid sequence encoding a crRNA sequence and a protein of the disclosure comprising a Cas protein. In one embodiment, the transfer plasmid comprises a nucleic acid sequence encoding a crRNA sequence and a protein of the disclosure comprising a Cas protein and a localization signal. In one embodiment, the transfer plasmid comprises a nucleic acid sequence encoding a crRNA sequence and a protein of the disclosure comprising a Cas protein and a NLS, NES or other localization signal.

[0231] For example, in one embodiment, the transfer plasmid comprises a nucleic acid sequence encoding a tandem crRNA array of the disclosure. In one embodiment, the tandem array comprises one or more, two or more, three or more, four or more, five or more six or more, seven or more or eight or more crRNA sequences. In one embodiment, each crRNA in the tandem crRNA array comprises a direct repeat (DR) sequence and a spacer sequence. In one embodiment the direct repeat sequence may be located upstream (i.e., 5′) from the guide sequence or spacer sequence. In other embodiments, the direct repeat sequence may be located downstream (i.e., 3′) from the guide sequence or spacer sequence.

[0232] In one embodiment, each crRNA in the tandem crRNA array comprises a different direct repeat sequence. For example, in one embodiment, nucleotide substitutions within the loop region of the direct repeat, multiple guide-RNAs provides for efficiently generated ordered arrays of crRNAs.

[0233] In one embodiment, the tandem array comprises at least two or more crRNA, wherein each crRNA comprises a sequence substantially complementary to a target RNA. For example, in one embodiment, each crRNA comprises a different sequence substantially complementary to a different sequence in a single target RNA. In one embodiment, each crRNA comprises a different sequence substantially complementary to a different sequence in a different target RNAs. In one embodiment, the different target RNAs are related to a single disease, disorder or infection. For example, in one embodiment, the different target RNAs are each viral RNA sequences of a virus.

[0234] In one embodiment, the tandem array comprises at least two or more crRNA comprising sequences substantially complementary to a genomic coronavirus RNA sequence and/or a sub-genomic coronavirus RNA sequence. In one embodiment, the tandem array comprises at least two or more crRNA comprising a substantially complementary to a sequence at least 70%, at least 71%, at least 72%, at least 73%, at least 74%, at least 75%, at least 76%, at least 77%, at least 78%, at least 79%, at least 80%, at least 81%, at least 82%, at least 83%, at least 84%, at least 85%, at least 86%, at least 87%, at least 88%, at least 89%, at least 90%, at least 91%, at least 92%, at least 93%, at least 94%, at least 95%, at least 96%, at least 97%, at least 98%, or at least 99% homologous to a sequence selected from SEQ ID NOs: 167-188 or a fragment thereof. In one embodiment, the tandem array comprises at least two or more crRNA comprising a substantially complementary to a sequence selected from SEQ ID NOs: 167-188, or a fragment thereof.

[0235] In one embodiment, the tandem array comprises at least two or more crRNA comprising a sequence at least 70%, at least 71%, at least 72%, at least 73%, at least 74%, at least 75%, at least 76%, at least 77%, at least 78%, at least 79%, at least 80%, at least 81%, at least 82%, at least 83%, at least 84%, at least 85%, at least 86%, at least 87%, at least 88%, at least 89%, at least 90%, at least 91%, at least 92%, at least 93%, at least 94%, at least 95%, at least 96%, at least 97%, at least 98%, or at least 99% homologous to a sequence selected from SEQ ID NOs: 189-224. In one embodiment, the tandem array comprises at least two or more crRNA comprising a sequence selected from SEQ ID NOs: 189-22.

[0236] In one embodiment, the tandem array comprises a sequence at least 70%, at least 71%, at least 72%, at least 73%, at least 74%, at least 75%, at least 76%, at least 77%, at least 78%, at least 79%, at least 80%, at least 81%, at least 82%, at least 83%, at least 84%, at least 85%, at least 86%, at least 87%, at least 88%, at least 89%, at least 90%, at least 91%, at least 92%, at least 93%, at least 94%, at least 95%, at least 96%, at least 97%, at least 98%, or at least 99% homologous to SEQ ID NO:275. In one embodiment, the tandem array comprises a sequence of SEQ ID NO: 275.

[0237] In one embodiment, the tandem array comprises at least two or more crRNA each independently comprising sequences substantially complementary to an influenza virus sequence. In one embodiment, the tandem array comprises at least two or more crRNA each comprising a sequence substantially complementary to an influenza virus genomic mRNA sequence or a subgenomic mRNA sequence. In one embodiment, the tandem array comprises at least two or more crRNA each comprising a sequence substantially complementary to an Influenza virus PB2 sequence, PB1 sequence, PA sequence, HA sequence, NP sequence, NA sequence, M sequence or NS sequence.

[0238] In one embodiment, the tandem array comprises at least two or more crRNA comprising a substantially complementary to a sequence at least 70%, at least 71%, at least 72%, at least 73%, at least 74%, at least 75%, at least 76%, at least 77%, at least 78%, at least 79%, at least 80%, at least 81%, at least 82%, at least 83%, at least 84%, at least 85%, at least 86%, at least 87%, at least 88%, at least 89%, at least 90%, at least 91%, at least 92%, at least 93%, at least 94%, at least 95%, at least 96%, at least 97%, at least 98%, or at least 99% homologous to a sequence selected from SEQ ID NOs: 225-244 or a fragment thereof. In one embodiment, the tandem array comprises at least two or more crRNA comprising a substantially complementary to a sequence selected from SEQ ID NOs: 225-244, or a fragment thereof.

[0239] In one embodiment, the tandem array comprises at least two or more crRNA comprising a sequence at least 70%, at least 71%, at least 72%, at least 73%, at least 74%, at least 75%, at least 76%, at least 77%, at least 78%, at least 79%, at least 80%, at least 81%, at least 82%, at least 83%, at least 84%, at least 85%, at least 86%, at least 87%, at least 88%, at least 89%, at least 90%, at least 91%, at least 92%, at least 93%, at least 94%, at least 95%, at least 96%, at least 97%, at least 98%, or at least 99% homologous to a sequence selected from SEQ ID NOs: 245-249. In one embodiment, the tandem array comprises at least two or more crRNA comprising a sequence selected from SEQ ID NOs: 245-249.

[0240] In one embodiment, the tandem array comprises a sequence at least 70%, at least 71%, at least 72%, at least 73%, at least 74%, at least 75%, at least 76%, at least 77%, at least 78%, at least 79%, at least 80%, at least 81%, at least 82%, at least 83%, at least 84%, at least 85%, at least 86%, at least 87%, at least 88%, at least 89%, at least 90%, at least 91%, at least 92%, at least 93%, at least 94%, at least 95%, at least 96%, at least 97%, at least 98%, or at least 99% homologous to one of SEQ ID NO:276-279. In one embodiment, the tandem array comprises a sequence of one of SEQ ID NO: 276-279.

[0241] In one embodiment, the tandem array comprises at least two or more crRNA each independently comprising sequences substantially complementary to mRNA sequences within a cellular pathway. In some embodiments, the cellular pathway lead, for example, to aberrant control of cellular processes, with uncontrolled growth and increased cell survival. For example, in one embodiment, each crRNA independently comprises a sequence substantially complementary to an mRNA sequence within the RAS, JAK-STAT, PI3K/AKT, or MAPK cellular pathway.

[0242] In one embodiment, nucleic acid sequence encoding Cas protein comprises a sequence encoding an amino acid sequence at least 70%, at least 71%, at least 72%, at least 73%, at least 74%, at least 75%, at least 76%, at least 77%, at least 78%, at least 79%, at least 80%, at least 81%, at least 82%, at least 83%, at least 84%, at least 85%, at least 86%, at least 87%, at least 88%, at least 89%, at least 90%, at least 91%, at least 92%, at least 93%, at least 94%, at least 95%, at least 96%, at least 97%, at least 98%, or at least 99% homologous to one of SEQ ID NOs: 1-47 or 68-100. In one embodiment, nucleic acid sequence encoding Cas protein comprises a sequence at least 70%, at least 71%, at least 72%, at least 73%, at least 74%, at least 75%, at least 76%, at least 77%, at least 78%, at least 79%, at least 80%, at least 81%, at least 82%, at least 83%, at least 84%, at least 85%, at least 86%, at least 87%, at least 88%, at least 89%, at least 90%, at least 91%, at least 92%, at least 93%, at least 94%, at least 95%, at least 96%, at least 97%, at least 98%, or at least 99% homologous to one of SEQ ID NOs: 132-133 or 14-166.

[0243] In one embodiment, the transfer plasmid comprises a sequence of SEQ ID NO:283.

[0244] In one embodiment, the envelope plasmid comprises a nucleic acid sequence encoding an envelope protein. In one embodiment, the envelope protein can be selected based on the desired cell type. In one embodiment, the envelope plasmid comprises a nucleic acid sequence encoding an HIV envelope protein. In one embodiment, the envelope plasmid comprises a nucleic acid sequence encoding a vesicular stomatitis virus g-protein (VSV-g) envelope protein. In one embodiment, the envelope plasmid comprises a nucleic acid sequence encoding an amino acid sequence at least 70%, at least 71%, at least 72%, at least 73%, at least 74%, at least 75%, at least 76%, at least 77%, at least 78%, at least 79%, at least 80%, at least 81%, at least 82%, at least 83%, at least 84%, at least 85%, at least 86%, at least 87%, at least 88%, at least 89%, at least 90%, at least 91%, at least 92%, at least 93%, at least 94%, at least 95%, at least 96%, at least 97%, at least 98%, or at least 99% homologous to SEQ ID NO:130. In one embodiment, the envelope plasmid comprises a nucleic acid sequence encoding an amino acid sequence of SEQ ID NO: 130.

[0245] In one embodiment, the envelope plasmid comprises a nucleic acid sequence encoding a coronavirus spike protein or a coronavirus spike protein-derived protein. For example in one embodiment, the envelope plasmid comprises a nucleic acid sequence encoding an amino acid sequence at least 70%, at least 71%, at least 72%, at least 73%, at least 74%, at least 75%, at least 76%, at least 77%, at least 78%, at least 79%, at least 80%, at least 81%, at least 82%, at least 83%, at least 84%, at least 85%, at least 86%, at least 87%, at least 88%, at least 89%, at least 90%, at least 91%, at least 92%, at least 93%, at least 94%, at least 95%, at least 96%, at least 97%, at least 98%, or at least 99% homologous to one of SEQ ID NOs:101-129. In one embodiment, the envelope plasmid comprises a nucleic acid sequence encoding an amino acid sequence of one of SEQ ID NOs: 101-129.

[0246] In one embodiment, viral envelope proteins from coronaviruses are not efficient for pseudotyping of lentiviral vectors. Thus, in one embodiment, the disclosure also provides novel coronavirus envelope proteins for use in pseudotyping a lentiviral vector. In one embodiment, the coronavirus envelope protein comprises an amino acid sequence at least 70%, at least 71%, at least 72%, at least 73%, at least 74%, at least 75%, at least 76%, at least 77%, at least 78%, at least 79%, at least 80%, at least 81%, at least 82%, at least 83%, at least 84%, at least 85%, at least 86%, at least 87%, at least 88%, at least 89%, at least 90%, at least 91%, at least 92%, at least 93%, at least 94%, at least 95%, at least 96%, at least 97%, at least 98%, or at least 99% homologous to one of SEQ ID NOs: 101-129. In one embodiment, the coronavirus envelope protein comprises an amino acid sequence of one of SEQ ID NOs: 101-129.

[0247] In one embodiment, the VPR plasmid comprises a nucleic acid sequence encoding a fusion protein comprising VPR, and a Cas protein of the disclosure.

[0248] In one embodiment, the packaging plasmid, transfer plasmid, and envelope plasmid are introduced into a cell. In one embodiment, the cell transcribes and translates the nucleic acid sequence encoding the gag-pol protein encoded by the packaging plasmid to produce the gag-pol polyprotein. In one embodiment, the cell transcribes and translates the nucleic acid sequence encoding the envelope protein of the envelope plasmid to produce the envelope protein. In one embodiment, the cell transcribes the nucleic acid sequence encoding the crRNA sequence or crRNA array of the transfer plasmid to produce the crRNA or crRNA array. In one embodiment, the cell transcribes and translates the nucleic acid sequence encoding the Cas protein of the transfer plasmid to produce the Cas or Cas fusion protein.

[0249] In one embodiment, the transcribed transfer plasmid and gag-pol proteins are packaged into a lentiviral vector. In one embodiment, the lentiviral vectors are collected from the cell media. In one embodiment, the viral particles transduce a target cell, wherein the transcribed the crRNA and Cas protein are cleaved and the translated thereby generating the Cas protein and crRNA, wherein the crRNA binds to the Cas protein and directs it to an RNA having a sequence substantially complementary to the crRNA sequence.

[0250] In one embodiment, the packaging plasmid, transfer plasmid, and envelope plasmid are introduced into a cell. In one embodiment, the cell transcribes and translates the nucleic acid sequence encoding the gag-pol protein encoded by the packaging plasmid to produce the gag-pol polyprotein. In one embodiment, the cell transcribes and translates the nucleic acid sequence encoding the envelope protein of the envelope plasmid to produce the envelope protein. In one embodiment, the cell transcribes the nucleic acid sequence encoding the gene to produce the gene. In one embodiment, the cell transcribes and translates the nucleic acid sequence encoding the gene of the transfer plasmid to produce a protein.

[0251] In one embodiment, the transcribed transfer plasmid and gag-pol proteins are packaged into a lentiviral vector. In one embodiment, the lentiviral vectors are collected from the cell media. In one embodiment, the viral particles transduce a target cell, wherein the transcribed gene is delivered to the cell and inserted into the genome.

[0252] In one embodiment, the transcribed transfer plasmid and gag-pol proteins are packaged into a lentiviral vector. In one embodiment, the lentiviral vectors are collected from the cell media. In one embodiment, the viral particles transduce a target cell, wherein the transcribed and translated gene is delivered to the cell.

[0253] In one embodiment, the gene or protein is delivered to a respiratory, vascular, renal, or cardiovascular cell type. Thus, in one embodiment the envelope protein is derived from a coronavirus. In one embodiment, the coronavirus envelope protein comprises an amino acid sequence at least 70%, at least 71%, at least 72%, at least 73%, at least 74%, at least 75%, at least 76%, at least 77%, at least 78%, at least 79%, at least 80%, at least 81%, at least 82%, at least 83%, at least 84%, at least 85%, at least 86%, at least 87%, at least 88%, at least 89%, at least 90%, at least 91%, at least 92%, at least 93%, at least 94%, at least 95%, at least 96%, at least 97%, at least 98%, or at least 99% homologous to one of SEQ ID NOs: 101-129. In one embodiment, the coronavirus envelope protein comprises an amino acid sequence of one of SEQ ID NOs: 101-129.

[0254] Further, a number of additional viral based systems have been developed for gene transfer into mammalian cells. For example, retroviruses provide a convenient platform for gene delivery systems. A selected gene can be inserted into a vector and packaged in retroviral particles using techniques known in the art. The recombinant virus can then be isolated and delivered to cells of the subject either in vivo or ex vivo. A number of retroviral systems are known in the art. In some embodiments, adenovirus vectors are used. A number of adenovirus vectors are known in the art. In one embodiment, lentivirus vectors are used.

[0255] For example, vectors derived from retroviruses such as the lentivirus are suitable tools to achieve long-term gene transfer since they allow long-term, stable integration of a transgene and its propagation in daughter cells. Lentiviral vectors have the added advantage over vectors derived from onco-retroviruses such as murine leukemia viruses in that they can transduce non-proliferating cells, such as hepatocytes. They also have the added advantage of low immunogenicity.

[0256] In one embodiment, the composition includes a vector derived from an adeno-associated virus (AAV). The term “AAV vector” means a vector derived from an adeno-associated virus serotype, including without limitation, AAV-1, AAV-2, AAV-3, AAV-4, AAV-5, AAV-6, AAV-7, AAV-8, and AAV-9. AAV vectors have become powerful gene delivery tools for the treatment of various disorders. AAV vectors possess a number of features that render them ideally suited for gene therapy, including a lack of pathogenicity, minimal immunogenicity, and the ability to transduce postmitotic cells in a stable and efficient manner. Expression of a particular gene contained within an AAV vector can be specifically targeted to one or more types of cells by choosing the appropriate combination of AAV serotype, promoter, and delivery method.

[0257] For example, in one embodiment, the AAV vector comprises a crRNA having substantially complementary to a Coronavirus genomic mRNA sequence or a Coronavirus subgenomic mRNA sequence. In one embodiment, the AAV vector comprises a crRNA array comprising two or more crRNA having substantially complementary to a Coronavirus genomic mRNA sequence or a Coronavirus subgenomic mRNA sequence. In one embodiment, the AAV vector comprises a sequence at least 70%, at least 71%, at least 72%, at least 73%, at least 74%, at least 75%, at least 76%, at least 77%, at least 78%, at least 79%, at least 80%, at least 81%, at least 82%, at least 83%, at least 84%, at least 85%, at least 86%, at least 87%, at least 88%, at least 89%, at least 90%, at least 91%, at least 92%, at least 93%, at least 94%, at least 95%, at least 96%, at least 97%, at least 98%, or at least 99% homologous to SEQ ID NO: 284. In one embodiment, the transfer plasmid comprises a sequence of SEQ ID NO: 284.

[0258] In one embodiment, the AAV vector comprises a crRNA having substantially complementary to an influenza virus genomic RNA sequence or an influenza virus subgenomic RNA sequence. In one embodiment, the transfer plasmid comprises a crRNA array comprising two or more crRNA having substantially complementary to an influenza virus genomic RNA sequence or an influenza virus subgenomic RNA sequence.

[0259] AAV vectors can have one or more of the AAV wild-type genes deleted in whole or part, preferably the rep and/or cap genes, but retain functional flanking ITR sequences. Despite the high degree of homology, the different serotypes have tropisms for different tissues. The receptor for AAV1 is unknown; however, AAV1 is known to transduce skeletal and cardiac muscle more efficiently than AAV2. Since most of the studies have been done with pseudotyped vectors in which the vector DNA flanked with AAV2 ITR is packaged into capsids of alternate serotypes, it is clear that the biological differences are related to the capsid rather than to the genomes. Recent evidence indicates that DNA expression cassettes packaged in AAV 1 capsids are at least 1 log 10 more efficient at transducing cardiomyocytes than those packaged in AAV2 capsids. In one embodiment, the viral delivery system is an adeno-associated viral delivery system. The adeno-associated virus can be of serotype 1 (AAV 1), serotype 2 (AAV2), serotype 3 (AAV3), serotype 4 (AAV4), serotype 5 (AAV5), serotype 6 (AAV6), serotype 7 (AAV7), serotype 8 (AAV8), or serotype 9 (AAV9).

[0260] Desirable AAV fragments for assembly into vectors include the cap proteins, including the vp1, vp2, vp3 and hypervariable regions, the rep proteins, including rep 78, rep 68, rep 52, and rep 40, and the sequences encoding these proteins. These fragments may be readily utilized in a variety of vector systems and host cells. Such fragments may be used alone, in combination with other AAV serotype sequences or fragments, or in combination with elements from other AAV or non-AAV viral sequences. As used herein, artificial AAV serotypes include, without limitation, AAV with a non-naturally occurring capsid protein. Such an artificial capsid may be generated by any suitable technique, using a selected AAV sequence (e.g., a fragment of a vp1 capsid protein) in combination with heterologous sequences which may be obtained from a different selected AAV serotype, non-contiguous portions of the same AAV serotype, from a non-AAV viral source, or from a non-viral source. An artificial AAV serotype may be, without limitation, a chimeric AAV capsid, a recombinant AAV capsid, or a “humanized” AAV capsid. Thus exemplary AAVs, or artificial AAVs, suitable for expression of one or more proteins, include AAV2/8 (see U.S. Pat. No. 7,282,199), AAV2/5 (available from the National Institutes of Health), AAV2/9 (International Patent Publication No. WO2005/033321), AAV2/6 (U.S. Pat. No. 6,156,303), and AAVrh8 (International Patent Publication No. WO2003/042397), among others.

[0261] In certain embodiments, the vector also includes conventional control elements which are operably linked to the transgene in a manner which permits its transcription, translation and/or expression in a cell transfected with the plasmid vector or infected with the virus produced by the invention. As used herein, “operably linked” sequences include both expression control sequences that are contiguous with the gene of interest and expression control sequences that act in trans or at a distance to control the gene of interest. Expression control sequences include appropriate transcription initiation, termination, promoter and enhancer sequences; efficient RNA processing signals such as splicing and polyadenylation (polyA) signals; sequences that stabilize cytoplasmic mRNA; sequences that enhance translation efficiency (i.e., Kozak consensus sequence); sequences that enhance protein stability; and when desired, sequences that enhance secretion of the encoded product. A great number of expression control sequences, including promoters which are native, constitutive, inducible and/or tissue-specific, are known in the art and may be utilized.

[0262] Additional promoter elements, e.g., enhancers, regulate the frequency of transcriptional initiation. Typically, these are located in the region 30-110 bp upstream of the start site, although a number of promoters have recently been shown to contain functional elements downstream of the start site as well. The spacing between promoter elements frequently is flexible, so that promoter function is preserved when elements are inverted or moved relative to one another. In the thymidine kinase (tk) promoter, the spacing between promoter elements can be increased to 50 bp apart before activity begins to decline. Depending on the promoter, it appears that individual elements can function either cooperatively or independently to activate transcription.

[0263] One example of a suitable promoter is the immediate early cytomegalovirus (CMV) promoter sequence. This promoter sequence is a strong constitutive promoter sequence capable of driving high levels of expression of any polynucleotide sequence operatively linked thereto. Another example of a suitable promoter is Elongation Growth Factor-1α (EF-1α). However, other constitutive promoter sequences may also be used, including, but not limited to the simian virus 40 (SV40) early promoter, mouse mammary tumor virus (MMTV), human immunodeficiency virus (HIV) long terminal repeat (LTR) promoter, MoMuLV promoter, an avian leukemia virus promoter, an Epstein-Barr virus immediate early promoter, a Rous sarcoma virus promoter, as well as human gene promoters such as, but not limited to, the actin promoter, the myosin promoter, the hemoglobin promoter, and the creatine kinase promoter. Further, the invention should not be limited to the use of constitutive promoters. Inducible promoters are also contemplated as part of the invention. The use of an inducible promoter provides a molecular switch capable of turning on expression of the polynucleotide sequence which it is operatively linked when such expression is desired, or turning off the expression when expression is not desired. Examples of inducible promoters include, but are not limited to a metallothionine promoter, a glucocorticoid promoter, a progesterone promoter, and a tetracycline promoter.

[0264] Enhancer sequences found on a vector also regulates expression of the gene contained therein. Typically, enhancers are bound with protein factors to enhance the transcription of a gene Enhancers may be located upstream or downstream of the gene it regulates Enhancers may also be tissue-specific to enhance transcription in a specific cell or tissue type. In one embodiment, the vector of the present invention comprises one or more enhancers to boost transcription of the gene present within the vector.

[0265] In order to assess the expression of a fusion protein of the invention, the expression vector to be introduced into a cell can also contain either a selectable marker gene or a reporter gene or both to facilitate identification and selection of expressing cells from the population of cells sought to be transfected or infected through viral vectors. In other aspects, the selectable marker may be carried on a separate piece of DNA and used in a co-transfection procedure. Both selectable markers and reporter genes may be flanked with appropriate regulatory sequences to enable expression in the host cells. Useful selectable markers include, for example, antibiotic-resistance genes, such as neo and the like.

[0266] Reporter genes are used for identifying potentially transfected cells and for evaluating the functionality of regulatory sequences. In general, a reporter gene is a gene that is not present in or expressed by the recipient organism or tissue and that encodes a polypeptide whose expression is manifested by some easily detectable property, e.g., enzymatic activity. Expression of the reporter gene is assayed at a suitable time after the DNA has been introduced into the recipient cells. Suitable reporter genes may include genes encoding luciferase, beta-galactosidase, chloramphenicol acetyl transferase, secreted alkaline phosphatase, or the green fluorescent protein gene (e.g., Ui-Tei et al., 2000 FEBS Letters 479: 79-82). Suitable expression systems are well known and may be prepared using known techniques or obtained commercially. In general, the construct with the minimal 5′ flanking region showing the highest level of expression of reporter gene is identified as the promoter. Such promoter regions may be linked to a reporter gene and used to evaluate agents for the ability to modulate promoter-driven transcription.

[0267] Methods of introducing and expressing genes into a cell are known in the art. In the context of an expression vector, the vector can be readily introduced into a host cell, e.g., mammalian, bacterial, yeast, or insect cell by any method in the art. For example, the expression vector can be transferred into a host cell by physical, chemical, or biological means.

[0268] Physical methods for introducing a polynucleotide into a host cell include calcium phosphate precipitation, lipofection, particle bombardment, microinjection, electroporation, and the like. Methods for producing cells comprising vectors and/or exogenous nucleic acids are well-known in the art. See, for example, Sambrook et al. (2012, Molecular Cloning: A Laboratory Manual, Cold Spring Harbor Laboratory, New York). An exemplary method for the introduction of a polynucleotide into a host cell is calcium phosphate transfection.

[0269] Biological methods for introducing a polynucleotide of interest into a host cell include the use of DNA and RNA vectors. Viral vectors, and especially retroviral vectors, have become the most widely used method for inserting genes into mammalian, e.g., human cells. Other viral vectors can be derived from lentivirus, poxviruses, herpes simplex virus I, adenoviruses and adeno-associated viruses, and the like. See, for example, U.S. Pat. Nos. 5,350,674 and 5,585,362.

[0270] Chemical means for introducing a polynucleotide into a host cell include colloidal dispersion systems, such as macromolecule complexes, nanocapsules, microspheres, beads, and lipid-based systems including oil-in-water emulsions, micelles, mixed micelles, and liposomes. An exemplary colloidal system for use as a delivery vehicle in vitro and in vivo is a liposome (e.g., an artificial membrane vesicle).

[0271] In the case where a non-viral delivery system is utilized, an exemplary delivery vehicle is a liposome. The use of lipid formulations is contemplated for the introduction of the nucleic acids into a host cell (in vitro, ex vivo or in vivo). In another aspect, the nucleic acid may be associated with a lipid. The nucleic acid associated with a lipid may be encapsulated in the aqueous interior of a liposome, interspersed within the lipid bilayer of a liposome, attached to a liposome via a linking molecule that is associated with both the liposome and the oligonucleotide, entrapped in a liposome, complexed with a liposome, dispersed in a solution containing a lipid, mixed with a lipid, combined with a lipid, contained as a suspension in a lipid, contained or complexed with a micelle, or otherwise associated with a lipid. Lipid, lipid/DNA or lipid/expression vector associated compositions are not limited to any particular structure in solution. For example, they may be present in a bilayer structure, as micelles, or with a “collapsed” structure. They may also simply be interspersed in a solution, possibly forming aggregates that are not uniform in size or shape. Lipids are fatty substances which may be naturally occurring or synthetic lipids. For example, lipids include the fatty droplets that naturally occur in the cytoplasm as well as the class of compounds which contain long-chain aliphatic hydrocarbons and their derivatives, such as fatty acids, alcohols, amines, amino alcohols, and aldehydes.

[0272] Lipids suitable for use can be obtained from commercial sources. For example, dimyristyl phosphatidylcholine (“DMPC”) can be obtained from Sigma, St. Louis, Mo.; dicetyl phosphate (“DCP”) can be obtained from K & K Laboratories (Plainview, N.Y.); cholesterol (“Choi”) can be obtained from Calbiochem-Behring; dimyristyl phosphatidylglycerol (“DMPG”) and other lipids may be obtained from Avanti Polar Lipids, Inc. (Birmingham, Ala.). Stock solutions of lipids in chloroform or chloroform/methanol can be stored at about −20° C. Chloroform is used as the only solvent since it is more readily evaporated than methanol. “Liposome” is a generic term encompassing a variety of single and multilamellar lipid vehicles formed by the generation of enclosed lipid bilayers or aggregates. Liposomes can be characterized as having vesicular structures with a phospholipid bilayer membrane and an inner aqueous medium. Multilamellar liposomes have multiple lipid layers separated by aqueous medium. They form spontaneously when phospholipids are suspended in an excess of aqueous solution. The lipid components undergo self-rearrangement before the formation of closed structures and entrap water and dissolved solutes between the lipid bilayers (Ghosh et al., 1991 Glycobiology 5: 505-10). However, compositions that have different structures in solution than the normal vesicular structure are also encompassed. For example, the lipids may assume a micellar structure or merely exist as nonuniform aggregates of lipid molecules. Also contemplated are lipofectamine-nucleic acid complexes.

[0273] Regardless of the method used to introduce exogenous nucleic acids into a host cell, in order to confirm the presence of the recombinant DNA sequence in the host cell, a variety of assays may be performed. Such assays include, for example, “molecular biological” assays well known to those of skill in the art, such as Southern and Northern blotting, RT-PCR and PCR; “biochemical” assays, such as detecting the presence or absence of a particular peptide, e.g., by immunological means (ELISAs and Western blots) or by assays described herein to identify agents falling within the scope of the invention.

### Systems

[0274] In one aspect, the present invention provides a system for decreasing the number of one or more RNA transcripts in a subject. In one embodiment the system comprises, in one or more vectors, a nucleic acid sequence encoding a protein, wherein the protein comprises a CRISPR-associated (Cas) protein, and optionally a localization sequence, such as an NLS, NES, or organelle localization signal; and a nucleic acid sequence encoding a tandem crRNA array.

[0275] In one embodiment, the tandem array comprises one or more, two or more, three or more, four or more, five or more six or more, seven or more or eight or more crRNA sequences. In one embodiment, each crRNA comprises a different sequence substantially complementary to a different sequence in a single target RNA. In one embodiment, each crRNA comprises a different sequence substantially complementary to a different sequence in a different target RNAs. In one embodiment, the different target RNAs are related to a single disease, disorder or infection. For example, in one embodiment, the different target RNAs are each viral RNA sequences of a virus.

[0276] In one embodiment, the nucleic acid sequence encoding the Cas and the nucleic acid sequence encoding a crRNA are in the same vector. In one embodiment, the nucleic acid sequence encoding the protein and the nucleic acid sequence encoding a crRNA are in different vectors.

[0277] In one embodiment, the nucleic acid sequence encoding a protein comprises (1) a nucleic acid sequence encoding an amino acid sequence at least 70%, at least 71%, at least 72%, at least 73%, at least 74%, at least 75%, at least 76%, at least 77%, at least 78%, at least 79%, at least 80%, at least 81%, at least 82%, at least 83%, at least 84%, at least 85%, at least 86%, at least 87%, at least 88%, at least 89%, at least 90%, at least 91%, at least 92%, at least 93%, at least 94%, at least 95%, at least 96%, at least 97%, at least 98%, or at least 99% identical to one of SEQ ID NOs: 1-47; and (2) optionally a nucleic acid sequence encoding an amino acid sequence at least 70%, at least 71%, at least 72%, at least 73%, at least 74%, at least 75%, at least 76%, at least 77%, at least 78%, at least 79%, at least 80%, at least 81%, at least 82%, at least 83%, at least 84%, at least 85%, at least 86%, at least 87%, at least 88%, at least 89%, at least 90%, at least 91%, at least 92%, at least 93%, at least 94%, at least 95%, at least 96%, at least 97%, at least 98%, or at least 99% identical to one of SEQ ID NOs: 50-66 and 323-935. In one embodiment, the nucleic acid sequence encoding a protein comprises (1) a nucleic acid sequence encoding an amino acid of one of SEQ ID NOs: 1-47; and (2) optionally a nucleic acid sequence encoding an amino acid of one of SEQ ID NOs: 50-66 and 323-935. In one embodiment, the nucleic acid sequence encoding a protein comprises a nucleic acid sequence encoding an amino acid at least 70%, at least 71%, at least 72%, at least 73%, at least 74%, at least 75%, at least 76%, at least 77%, at least 78%, at least 79%, at least 80%, at least 81%, at least 82%, at least 83%, at least 84%, at least 85%, at least 86%, at least 87%, at least 88%, at least 89%, at least 90%, at least 91%, at least 92%, at least 93%, at least 94%, at least 95%, at least 96%, at least 97%, at least 98%, or at least 99% identical to one of SEQ ID NOs: 68-100. In one embodiment, the nucleic acid sequence encoding a protein comprises a nucleic acid sequence encoding an amino acid of one of SEQ ID NOs: 68-100.

[0278] In one embodiment, the tandem array comprises one or more, two or more, three or more, four or more, five or more six or more, seven or more or eight or more crRNA sequences. In one embodiment, each crRNA in the tandem crRNA array comprises a direct repeat (DR) sequence and a spacer sequence. In one embodiment the direct repeat sequence may be located upstream (i.e., 5′) from the guide sequence or spacer sequence. In other embodiments, the direct repeat sequence may be located downstream (i.e., 3′) from the guide sequence or spacer sequence.

[0279] In one embodiment, each crRNA in the tandem crRNA array comprises a different direct repeat sequence. For example, in one embodiment, nucleotide substitutions within the loop region of the direct repeat, multiple guide-RNAs provides for efficiently generated ordered arrays of crRNAs.

[0280] In one embodiment, the tandem array comprises at least two or more crRNA, wherein each crRNA comprises a sequence substantially complementary to a target RNA. For example, in one embodiment, each crRNA comprises a different sequence substantially complementary to a different sequence in a single target RNA. In one embodiment, each crRNA comprises a different sequence substantially complementary to a different sequence in a different target RNAs. In one embodiment, the different target RNAs are related to a single disease, disorder or infection. For example, in one embodiment, the different target RNAs are each viral RNA sequences of a virus.

[0281] In one embodiment, the tandem array comprises at least two or more crRNA comprising sequences substantially complementary to a genomic coronavirus RNA sequence and/or a sub-genomic coronavirus RNA sequence. In one embodiment, the tandem array comprises at least two or more crRNA comprising a substantially complementary to a sequence at least 70%, at least 71%, at least 72%, at least 73%, at least 74%, at least 75%, at least 76%, at least 77%, at least 78%, at least 79%, at least 80%, at least 81%, at least 82%, at least 83%, at least 84%, at least 85%, at least 86%, at least 87%, at least 88%, at least 89%, at least 90%, at least 91%, at least 92%, at least 93%, at least 94%, at least 95%, at least 96%, at least 97%, at least 98%, or at least 99% homologous to a sequence selected from SEQ ID NOs: 167-188 or a fragment thereof. In one embodiment, the tandem array comprises at least two or more crRNA comprising a substantially complementary to a sequence selected from SEQ ID NOs: 167-188, or a fragment thereof.

[0282] In one embodiment, the tandem array comprises at least two or more crRNA comprising a sequence at least 70%, at least 71%, at least 72%, at least 73%, at least 74%, at least 75%, at least 76%, at least 77%, at least 78%, at least 79%, at least 80%, at least 81%, at least 82%, at least 83%, at least 84%, at least 85%, at least 86%, at least 87%, at least 88%, at least 89%, at least 90%, at least 91%, at least 92%, at least 93%, at least 94%, at least 95%, at least 96%, at least 97%, at least 98%, or at least 99% homologous to a sequence selected from SEQ ID NOs: 189-224. In one embodiment, the tandem array comprises at least two or more crRNA comprising a sequence selected from SEQ ID NOs: 189-224.

[0283] In one embodiment, the tandem array comprises a sequence at least 70%, at least 71%, at least 72%, at least 73%, at least 74%, at least 75%, at least 76%, at least 77%, at least 78%, at least 79%, at least 80%, at least 81%, at least 82%, at least 83%, at least 84%, at least 85%, at least 86%, at least 87%, at least 88%, at least 89%, at least 90%, at least 91%, at least 92%, at least 93%, at least 94%, at least 95%, at least 96%, at least 97%, at least 98%, or at least 99% homologous to SEQ ID NO:275. In one embodiment, the tandem array comprises a sequence of SEQ ID NO: 275.

[0284] In one embodiment, the tandem array comprises at least two or more crRNA each independently comprising sequences substantially complementary to an influenza virus sequence. In one embodiment, the tandem array comprises at least two or more crRNA each comprising a sequence substantially complementary to an influenza virus genomic mRNA sequence or a subgenomic mRNA sequence. In one embodiment, the tandem array comprises at least two or more crRNA each comprising a sequence substantially complementary to an Influenza virus PB2 sequence, PB1 sequence, PA sequence, HA sequence, NP sequence, NA sequence, M sequence or NS sequence.

[0285] In one embodiment, the tandem array comprises at least two or more crRNA comprising a substantially complementary to a sequence at least 70%, at least 71%, at least 72%, at least 73%, at least 74%, at least 75%, at least 76%, at least 77%, at least 78%, at least 79%, at least 80%, at least 81%, at least 82%, at least 83%, at least 84%, at least 85%, at least 86%, at least 87%, at least 88%, at least 89%, at least 90%, at least 91%, at least 92%, at least 93%, at least 94%, at least 95%, at least 96%, at least 97%, at least 98%, or at least 99% homologous to a sequence selected from SEQ ID NOs: 225-244 or a fragment thereof. In one embodiment, the tandem array comprises at least two or more crRNA comprising a substantially complementary to a sequence selected from SEQ ID NOs: 225-244, or a fragment thereof.

[0286] In one embodiment, the tandem array comprises at least two or more crRNA comprising a sequence at least 70%, at least 71%, at least 72%, at least 73%, at least 74%, at least 75%, at least 76%, at least 77%, at least 78%, at least 79%, at least 80%, at least 81%, at least 82%, at least 83%, at least 84%, at least 85%, at least 86%, at least 87%, at least 88%, at least 89%, at least 90%, at least 91%, at least 92%, at least 93%, at least 94%, at least 95%, at least 96%, at least 97%, at least 98%, or at least 99% homologous to a sequence selected from SEQ ID NOs: 245-264. In one embodiment, the tandem array comprises at least two or more crRNA comprising a sequence selected from SEQ ID NOs: 245-264.

[0287] In one embodiment, the tandem array comprises a sequence at least 70%, at least 71%, at least 72%, at least 73%, at least 74%, at least 75%, at least 76%, at least 77%, at least 78%, at least 79%, at least 80%, at least 81%, at least 82%, at least 83%, at least 84%, at least 85%, at least 86%, at least 87%, at least 88%, at least 89%, at least 90%, at least 91%, at least 92%, at least 93%, at least 94%, at least 95%, at least 96%, at least 97%, at least 98%, or at least 99% homologous to one of SEQ ID NO: 276-279. In one embodiment, the tandem array comprises a sequence of one of SEQ ID NO: 276-279.

[0288] In one embodiment, the tandem array comprises at least two or more crRNA each independently comprising sequences substantially complementary to mRNA sequences within a cellular pathway. In some embodiments, the cellular pathway lead, for example, to aberrant control of cellular processes, with uncontrolled growth and increased cell survival. For example, in one embodiment, each crRNA independently comprises a sequence substantially complementary to an mRNA sequence within the RAS, JAK-STAT, PI3K/AKT, or MAPK cellular pathway.

### Compositions and Formulations

[0289] In one aspect, the present invention provides compositions for decreasing the number of an RNA transcript in a subject. In one embodiment, the composition comprises a fusion protein, wherein the fusion protein comprises a CRISPR-associated (Cas) protein, and optionally a localization sequence, such as an NLS, NES or organelle localization signal. In one embodiment, the composition comprises a tandem crRNA array. In one embodiment, the tandem crRNA array comprises two or more crRNA which each substantially hybridizes to a target RNA sequence in one or more RNA transcripts.

[0290] In one embodiment, the composition comprises a protein comprising (1) an amino acid sequence at least 70%, at least 71%, at least 72%, at least 73%, at least 74%, at least 75%, at least 76%, at least 77%, at least 78%, at least 79%, at least 80%, at least 81%, at least 82%, at least 83%, at least 84%, at least 85%, at least 86%, at least 87%, at least 88%, at least 89%, at least 90%, at least 91%, at least 92%, at least 93%, at least 94%, at least 95%, at least 96%, at least 97%, at least 98%, or at least 99% identical to one of SEQ ID NOs: 1-47; and (2) optionally an amino acid sequence at least 70%, at least 71%, at least 72%, at least 73%, at least 74%, at least 75%, at least 76%, at least 77%, at least 78%, at least 79%, at least 80%, at least 81%, at least 82%, at least 83%, at least 84%, at least 85%, at least 86%, at least 87%, at least 88%, at least 89%, at least 90%, at least 91%, at least 92%, at least 93%, at least 94%, at least 95%, at least 96%, at least 97%, at least 98%, or at least 99% identical to one of SEQ ID NOs: 50-66 and 323-935. In one embodiment, composition comprises a protein comprising (1) an amino acid of one of SEQ ID NOs: 1-47; and (2) optionally an amino acid of one of SEQ ID NOs: 50-66 and 323-935.

[0291] In one embodiment, composition comprises a protein comprising an amino acid sequence at least 70%, at least 71%, at least 72%, at least 73%, at least 74%, at least 75%, at least 76%, at least 77%, at least 78%, at least 79%, at least 80%, at least 81%, at least 82%, at least 83%, at least 84%, at least 85%, at least 86%, at least 87%, at least 88%, at least 89%, at least 90%, at least 91%, at least 92%, at least 93%, at least 94%, at least 95%, at least 96%, at least 97%, at least 98%, or at least 99% identical to one of SEQ ID NOs: 68-100. In one embodiment, the nucleic acid sequence encoding a protein comprises a protein comprising an amino acid sequence of one of SEQ ID NOs: 68-100.

[0292] In one embodiment, the composition comprises a tandem crRNA array, wherein the array comprises one or more, two or more, three or more, four or more, five or more six or more, seven or more or eight or more crRNA sequences. In one embodiment, each crRNA in the tandem crRNA array comprises a direct repeat (DR) sequence and a spacer sequence. In one embodiment the direct repeat sequence may be located upstream (i.e., 5′) from the guide sequence or spacer sequence. In other embodiments, the direct repeat sequence may be located downstream (i.e., 3′) from the guide sequence or spacer sequence.

[0293] In one embodiment, each crRNA in the tandem crRNA array comprises a different direct repeat sequence. For example, in one embodiment, nucleotide substitutions within the loop region of the direct repeat, multiple guide-RNAs provides for efficiently generated ordered arrays of crRNAs.

[0294] In one embodiment, the composition comprises a tandem array wherein the tandem array comprises at least two or more crRNA, wherein each crRNA comprises a sequence substantially complementary to a target RNA. For example, in one embodiment, each crRNA comprises a different sequence substantially complementary to a different sequence in a single target RNA. In one embodiment, each crRNA comprises a different sequence substantially complementary to a different sequence in a different target RNAs. In one embodiment, the different target RNAs are related to a single disease, disorder or infection. For example, in one embodiment, the different target RNAs are each viral RNA sequences of a virus.

[0295] In one embodiment, the tandem array comprises at least two or more crRNA comprising sequences substantially complementary to a genomic coronavirus RNA sequence and/or a sub-genomic coronavirus RNA sequence. In one embodiment, the tandem array comprises at least two or more crRNA comprising a substantially complementary to a sequence at least 70%, at least 71%, at least 72%, at least 73%, at least 74%, at least 75%, at least 76%, at least 77%, at least 78%, at least 79%, at least 80%, at least 81%, at least 82%, at least 83%, at least 84%, at least 85%, at least 86%, at least 87%, at least 88%, at least 89%, at least 90%, at least 91%, at least 92%, at least 93%, at least 94%, at least 95%, at least 96%, at least 97%, at least 98%, or at least 99% homologous to a sequence selected from SEQ ID NOs: 167-188, or a fragment thereof. In one embodiment, the tandem array comprises at least two or more crRNA comprising a substantially complementary to a sequence selected from SEQ ID NOs: 167-188, or a fragment thereof.

[0296] In one embodiment, the tandem array comprises at least two or more crRNA comprising a sequence at least 70%, at least 71%, at least 72%, at least 73%, at least 74%, at least 75%, at least 76%, at least 77%, at least 78%, at least 79%, at least 80%, at least 81%, at least 82%, at least 83%, at least 84%, at least 85%, at least 86%, at least 87%, at least 88%, at least 89%, at least 90%, at least 91%, at least 92%, at least 93%, at least 94%, at least 95%, at least 96%, at least 97%, at least 98%, or at least 99% homologous to a sequence selected from SEQ ID NOs: 189-224. In one embodiment, the tandem array comprises at least two or more crRNA comprising a sequence selected from SEQ ID NOs: 189-224.

[0297] In one embodiment, the tandem array comprises a sequence at least 70%, at least 71%, at least 72%, at least 73%, at least 74%, at least 75%, at least 76%, at least 77%, at least 78%, at least 79%, at least 80%, at least 81%, at least 82%, at least 83%, at least 84%, at least 85%, at least 86%, at least 87%, at least 88%, at least 89%, at least 90%, at least 91%, at least 92%, at least 93%, at least 94%, at least 95%, at least 96%, at least 97%, at least 98%, or at least 99% homologous to SEQ ID NO:275. In one embodiment, the tandem array comprises a sequence of SEQ ID NO: 275.

[0298] In one embodiment, the tandem array comprises at least two or more crRNA each independently comprising sequences substantially complementary to an influenza virus sequence. In one embodiment, the tandem array comprises at least two or more crRNA each comprising a sequence substantially complementary to an influenza virus genomic mRNA sequence or a subgenomic mRNA sequence. In one embodiment, the tandem array comprises at least two or more crRNA each comprising a sequence substantially complementary to an Influenza virus PB2 sequence, PB1 sequence, PA sequence, HA sequence, NP sequence, NA sequence, M sequence or NS sequence.

[0299] In one embodiment, the tandem array comprises at least two or more crRNA comprising a substantially complementary to a sequence at least 70%, at least 71%, at least 72%, at least 73%, at least 74%, at least 75%, at least 76%, at least 77%, at least 78%, at least 79%, at least 80%, at least 81%, at least 82%, at least 83%, at least 84%, at least 85%, at least 86%, at least 87%, at least 88%, at least 89%, at least 90%, at least 91%, at least 92%, at least 93%, at least 94%, at least 95%, at least 96%, at least 97%, at least 98%, or at least 99% homologous to a sequence selected from SEQ ID NOs: 225-244 or a fragment thereof. In one embodiment, the tandem array comprises at least two or more crRNA comprising a substantially complementary to a sequence selected from SEQ ID NOs: 225-244, or a fragment thereof.

[0300] In one embodiment, the tandem array comprises at least two or more crRNA comprising a sequence at least 70%, at least 71%, at least 72%, at least 73%, at least 74%, at least 75%, at least 76%, at least 77%, at least 78%, at least 79%, at least 80%, at least 81%, at least 82%, at least 83%, at least 84%, at least 85%, at least 86%, at least 87%, at least 88%, at least 89%, at least 90%, at least 91%, at least 92%, at least 93%, at least 94%, at least 95%, at least 96%, at least 97%, at least 98%, or at least 99% homologous to a sequence selected from SEQ ID NOs: 245-264. In one embodiment, the tandem array comprises at least two or more crRNA comprising a sequence selected from SEQ ID NOs: 245-264.

[0301] In one embodiment, the tandem array comprises a sequence at least 70%, at least 71%, at least 72%, at least 73%, at least 74%, at least 75%, at least 76%, at least 77%, at least 78%, at least 79%, at least 80%, at least 81%, at least 82%, at least 83%, at least 84%, at least 85%, at least 86%, at least 87%, at least 88%, at least 89%, at least 90%, at least 91%, at least 92%, at least 93%, at least 94%, at least 95%, at least 96%, at least 97%, at least 98%, or at least 99% homologous to one of SEQ ID NO: 276-279. In one embodiment, the tandem array comprises a sequence of one of SEQ ID NO: 276-279.

[0302] In one embodiment, the tandem array comprises at least two or more crRNA each independently comprising sequences substantially complementary to mRNA sequences within a cellular pathway. In some embodiments, the cellular pathway lead, for example, to aberrant control of cellular processes, with uncontrolled growth and increased cell survival. For example, in one embodiment, each crRNA independently comprises a sequence substantially complementary to an mRNA sequence within the RAS, JAK-STAT, PI3K/AKT, or MAPK cellular pathway.

[0303] The disclosure also encompasses the use of pharmaceutical compositions of the disclosure to practice the methods of the disclosure. Such a pharmaceutical composition may consist of at least one modulator (e.g., inhibitor or activator) composition of the invention or a salt thereof in a form suitable for administration to a subject, or the pharmaceutical composition may comprise at least one modulator (e.g., inhibitor or activator) composition of the invention or a salt thereof, and one or more pharmaceutically acceptable carriers, one or more additional ingredients, or some combination of these. The compound of the invention may be present in the pharmaceutical composition in the form of a physiologically acceptable salt, such as in combination with a physiologically acceptable cation or anion, as is well known in the art.

[0304] In an embodiment, the pharmaceutical compositions useful for practicing the methods of the invention may be administered to deliver a dose of between 1 ng/kg/day and 100 mg/kg/day. In another embodiment, the pharmaceutical compositions useful for practicing the invention may be administered to deliver a dose of between 1 ng/kg/day and 500 mg/kg/day.

[0305] The relative amounts of the active ingredient, the pharmaceutically acceptable carrier, and any additional ingredients in a pharmaceutical composition of the invention will vary, depending upon the identity, size, and condition of the subject treated and further depending upon the route by which the composition is to be administered. By way of example, the composition may comprise between 0.1% and 100% (w/w) active ingredient.

[0306] Pharmaceutical compositions that are useful in the methods of the invention may be suitably developed for oral, rectal, vaginal, parenteral, topical, pulmonary, intranasal, buccal, ophthalmic, or another route of administration. A composition useful within the methods of the invention may be directly administered to the skin, or any other tissue of a mammal. Other contemplated formulations include liposomal preparations, resealed erythrocytes containing the active ingredient, and immunologically-based formulations. The route(s) of administration will be readily apparent to the skilled artisan and will depend upon any number of factors including the type and severity of the disease being treated, the type and age of the veterinary or human subject being treated, and the like.

[0307] The formulations of the pharmaceutical compositions described herein may be prepared by any method known or hereafter developed in the art of pharmacology. In general, such preparatory methods include the step of bringing the active ingredient into association with a carrier or one or more other accessory ingredients, and then, if necessary or desirable, shaping or packaging the product into a desired single- or multi-dose unit.

[0308] As used herein, a “unit dose” is a discrete amount of the pharmaceutical composition comprising a predetermined amount of the active ingredient. The amount of the active ingredient is generally equal to the dosage of the active ingredient that would be administered to a subject or a convenient fraction of such a dosage such as, for example, one-half or one-third of such a dosage. The unit dosage form may be for a single daily dose or one of multiple daily doses (e.g., about 1 to 4 or more times per day). When multiple daily doses are used, the unit dosage form may be the same or different for each dose.

[0309] In one embodiment, the compositions of the invention are formulated using one or more pharmaceutically acceptable excipients or carriers. In one embodiment, the pharmaceutical compositions of the invention comprise a therapeutically effective amount of a compound or conjugate of the invention and a pharmaceutically acceptable carrier. Pharmaceutically acceptable carriers that are useful, include, but are not limited to, glycerol, water, saline, ethanol and other pharmaceutically acceptable salt solutions such as phosphates and salts of organic acids. Examples of these and other pharmaceutically acceptable carriers are described in Remington's Pharmaceutical Sciences (1991, Mack Publication Co., New Jersey).

[0310] The carrier may be a solvent or dispersion medium containing, for example, water, ethanol, polyol (for example, glycerol, propylene glycol, and liquid polyethylene glycol, and the like), suitable mixtures thereof, and vegetable oils. The proper fluidity may be maintained, for example, by the use of a coating such as lecithin, by the maintenance of the required particle size in the case of dispersion and by the use of surfactants. Prevention of the action of microorganisms may be achieved by various antibacterial and antifungal agents, for example, parabens, chlorobutanol, phenol, ascorbic acid, thimerosal, and the like. In many cases, isotonic agents, for example, sugars, sodium chloride, or polyalcohols such as mannitol and sorbitol are included in the composition. Prolonged absorption of the injectable compositions may be brought about by including in the composition an agent that delays absorption, for example, aluminum monostearate or gelatin. In one embodiment, the pharmaceutically acceptable carrier is not DMSO alone.

[0311] Formulations may be employed in admixtures with conventional excipients, i.e., pharmaceutically acceptable organic or inorganic carrier substances suitable for oral, vaginal, parenteral, nasal, intravenous, subcutaneous, enteral, or any other suitable mode of administration, known to the art. The pharmaceutical preparations may be sterilized and if desired mixed with auxiliary agents, e.g., lubricants, preservatives, stabilizers, wetting agents, emulsifiers, salts for influencing osmotic pressure buffers, coloring, flavoring and/or aromatic substances and the like. They may also be combined where desired with other active agents, e.g., other analgesic agents.

[0312] As used herein, “additional ingredients” include, but are not limited to, one or more of the following: excipients; surface active agents; dispersing agents; inert diluents; granulating and disintegrating agents; binding agents; lubricating agents; sweetening agents; flavoring agents; coloring agents; preservatives; physiologically degradable compositions such as gelatin; aqueous vehicles and solvents; oily vehicles and solvents; suspending agents; dispersing or wetting agents; emulsifying agents, demulcents; buffers; salts; thickening agents; fillers; emulsifying agents; antioxidants; antibiotics; antifungal agents; stabilizing agents; and pharmaceutically acceptable polymeric or hydrophobic materials. Other “additional ingredients” that may be included in the pharmaceutical compositions of the invention are known in the art and described, for example in Genaro, ed. (1985, Remington's Pharmaceutical Sciences, Mack Publishing Co., Easton, Pa.), which is incorporated herein by reference.

[0313] The composition of the invention may comprise a preservative from about 0.005% to 2.0% by total weight of the composition. The preservative is used to prevent spoilage in the case of exposure to contaminants in the environment. Examples of preservatives useful in accordance with the invention included but are not limited to those selected from the group consisting of benzyl alcohol, sorbic acid, parabens, imidurea and combinations thereof. An exemplary preservative is a combination of about 0.5% to 2.0% benzyl alcohol and 0.05% to 0.5% sorbic acid.

[0314] In one embodiment, the composition includes an anti-oxidant and a chelating agent that inhibits the degradation of the compound. Exemplary antioxidants for some compounds are BHT, BHA, alpha-tocopherol and ascorbic acid in the range of about 0.01% to 0.3% and BHT in the range of 0.03% to 0.1% by weight by total weight of the composition. In one embodiment, the chelating agent is present in an amount of from 0.01% to 0.5% by weight by total weight of the composition. Exemplary chelating agents include edetate salts (e.g. disodium edetate) and citric acid in the weight range of about 0.01% to 0.20%. In some embodiments, the chelating agent is in the range of 0.02% to 0.10% by weight by total weight of the composition. The chelating agent is useful for chelating metal ions in the composition that may be detrimental to the shelf life of the formulation. While BHT and disodium edetate are exemplary antioxidants and chelating agent respectively for some compounds, other suitable and equivalent antioxidants and chelating agents may be substituted therefore as would be known to those skilled in the art.

[0315] Liquid suspensions may be prepared using conventional methods to achieve suspension of the active ingredient in an aqueous or oily vehicle. Aqueous vehicles include, for example, water, and isotonic saline. Oily vehicles include, for example, almond oil, oily esters, ethyl alcohol, vegetable oils such as arachis, olive, sesame, or coconut oil, fractionated vegetable oils, and mineral oils such as liquid paraffin. Liquid suspensions may further comprise one or more additional ingredients including, but not limited to, suspending agents, dispersing or wetting agents, emulsifying agents, demulcents, preservatives, buffers, salts, flavorings, coloring agents, and sweetening agents. Oily suspensions may further comprise a thickening agent. Known suspending agents include, but are not limited to, sorbitol syrup, hydrogenated edible fats, sodium alginate, polyvinylpyrrolidone, gum tragacanth, gum acacia, and cellulose derivatives such as sodium carboxymethylcellulose, methylcellulose, hydroxypropylmethylcellulose. Known dispersing or wetting agents include, but are not limited to, naturally-occurring phosphatides such as lecithin, condensation products of an alkylene oxide with a fatty acid, with a long chain aliphatic alcohol, with a partial ester derived from a fatty acid and a hexitol, or with a partial ester derived from a fatty acid and a hexitol anhydride (e.g., polyoxyethylene stearate, heptadecaethyleneoxycetanol, polyoxyethylene sorbitol monooleate, and polyoxyethylene sorbitan monooleate, respectively). Known emulsifying agents include, but are not limited to, lecithin, and acacia. Known preservatives include, but are not limited to, methyl, ethyl, or n-propyl-para-hydroxybenzoates, ascorbic acid, and sorbic acid. Known sweetening agents include, for example, glycerol, propylene glycol, sorbitol, sucrose, and saccharin. Known thickening agents for oily suspensions include, for example, beeswax, hard paraffin, and cetyl alcohol.

[0316] Liquid solutions of the active ingredient in aqueous or oily solvents may be prepared in substantially the same manner as liquid suspensions, the primary difference being that the active ingredient is dissolved, rather than suspended in the solvent. As used herein, an “oily” liquid is one which comprises a carbon-containing liquid molecule and which exhibits a less polar character than water. Liquid solutions of the pharmaceutical composition of the invention may comprise each of the components described with regard to liquid suspensions, it being understood that suspending agents will not necessarily aid dissolution of the active ingredient in the solvent. Aqueous solvents include, for example, water, and isotonic saline. Oily solvents include, for example, almond oil, oily esters, ethyl alcohol, vegetable oils such as arachis, olive, sesame, or coconut oil, fractionated vegetable oils, and mineral oils such as liquid paraffin.

[0317] Powdered and granular formulations of a pharmaceutical preparation of the invention may be prepared using known methods. Such formulations may be administered directly to a subject, used, for example, to form tablets, to fill capsules, or to prepare an aqueous or oily suspension or solution by addition of an aqueous or oily vehicle thereto. Each of these formulations may further comprise one or more of dispersing or wetting agent, a suspending agent, and a preservative. Additional excipients, such as fillers and sweetening, flavoring, or coloring agents, may also be included in these formulations.

[0318] A pharmaceutical composition of the invention may also be prepared, packaged, or sold in the form of oil-in-water emulsion or a water-in-oil emulsion. The oily phase may be a vegetable oil such as olive or arachis oil, a mineral oil such as liquid paraffin, or a combination of these. Such compositions may further comprise one or more emulsifying agents such as naturally occurring gums such as gum acacia or gum tragacanth, naturally-occurring phosphatides such as soybean or lecithin phosphatide, esters or partial esters derived from combinations of fatty acids and hexitol anhydrides such as sorbitan monooleate, and condensation products of such partial esters with ethylene oxide such as polyoxyethylene sorbitan monooleate. These emulsions may also contain additional ingredients including, for example, sweetening or flavoring agents.

[0319] Methods for impregnating or coating a material with a chemical composition are known in the art, and include, but are not limited to methods of depositing or binding a chemical composition onto a surface, methods of incorporating a chemical composition into the structure of a material during the synthesis of the material (i.e., such as with a physiologically degradable material), and methods of absorbing an aqueous or oily solution or suspension into an absorbent material, with or without subsequent drying.

[0320] The regimen of administration may affect what constitutes an effective amount. The therapeutic formulations may be administered to the subject either prior to or after a diagnosis of disease. Further, several divided dosages, as well as staggered dosages may be administered daily or sequentially, or the dose may be continuously infused, or may be a bolus injection. Further, the dosages of the therapeutic formulations may be proportionally increased or decreased as indicated by the exigencies of the therapeutic or prophylactic situation.

[0321] Administration of the compositions of the present invention to a subject, include a mammal, for example a human, may be carried out using known procedures, at dosages and for periods of time effective to prevent or treat disease. An effective amount of the therapeutic compound necessary to achieve a therapeutic effect may vary according to factors such as the activity of the particular compound employed; the time of administration; the rate of excretion of the compound; the duration of the treatment; other drugs, compounds or materials used in combination with the compound; the state of the disease or disorder, age, sex, weight, condition, general health and prior medical history of the subject being treated, and like factors well-known in the medical arts. Dosage regimens may be adjusted to provide the optimum therapeutic response. For example, several divided doses may be administered daily, or the dose may be proportionally reduced as indicated by the exigencies of the therapeutic situation. A non-limiting example of an effective dose range for a therapeutic compound of the invention is from about 1 and 5,000 mg/kg of body weight/per day. One of ordinary skill in the art would be able to study the relevant factors and make the determination regarding the effective amount of the therapeutic compound without undue experimentation.

[0322] The compound may be administered to a subject as frequently as several times daily, or it may be administered less frequently, such as once a day, once a week, once every two weeks, once a month, or even less frequently, such as once every several months or even once a year or less. It is understood that the amount of compound dosed per day may be administered, in non-limiting examples, every day, every other day, every 2 days, every 3 days, every 4 days, or every 5 days. For example, with every other day administration, a 5 mg per day dose may be initiated on Monday with a first subsequent 5 mg per day dose administered on Wednesday, a second subsequent 5 mg per day dose administered on Friday, and so on. The frequency of the dose will be readily apparent to the skilled artisan and will depend upon any number of factors, such as, but not limited to, the type and severity of the disease being treated, the type and age of the animal, etc.

[0323] Actual dosage levels of the active ingredients in the pharmaceutical compositions of this invention may be varied so as to obtain an amount of the active ingredient that is effective to achieve the desired therapeutic response for a particular subject, composition, and mode of administration, without being toxic to the subject.

[0324] A medical doctor, e.g., physician or veterinarian, having ordinary skill in the art may readily determine and prescribe the effective amount of the pharmaceutical composition required. For example, the physician or veterinarian could start doses of the compounds of the invention employed in the pharmaceutical composition at levels lower than that required in order to achieve the desired therapeutic effect and gradually increase the dosage until the desired effect is achieved.

[0325] In particular embodiments, it is especially advantageous to formulate the compound in dosage unit form for ease of administration and uniformity of dosage. Dosage unit form as used herein refers to physically discrete units suited as unitary dosages for the subjects to be treated; each unit containing a predetermined quantity of therapeutic compound calculated to produce the desired therapeutic effect in association with the required pharmaceutical vehicle. The dosage unit forms of the invention are dictated by and directly dependent on (a) the unique characteristics of the therapeutic compound and the particular therapeutic effect to be achieved, and (b) the limitations inherent in the art of compounding/formulating such a therapeutic compound for the treatment of a disease in a subject.

[0326] In one embodiment, the compositions of the invention are administered to the subject in dosages that range from one to five times per day or more. In another embodiment, the compositions of the invention are administered to the subject in range of dosages that include, but are not limited to, once every day, every two, days, every three days to once a week, and once every two weeks. It will be readily apparent to one skilled in the art that the frequency of administration of the various combination compositions of the invention will vary from subject to subject depending on many factors including, but not limited to, age, disease or disorder to be treated, gender, overall health, and other factors. Thus, the invention should not be construed to be limited to any particular dosage regime and the precise dosage and composition to be administered to any subject will be determined by the attending physical taking all other factors about the subject into account.

[0327] Compounds of the invention for administration may be in the range of from about 1 mg to about 10,000 mg, about 20 mg to about 9,500 mg, about 40 mg to about 9,000 mg, about 75 mg to about 8,500 mg, about 150 mg to about 7,500 mg, about 200 mg to about 7,000 mg, about 3050 mg to about 6,000 mg, about 500 mg to about 5,000 mg, about 750 mg to about 4,000 mg, about 1 mg to about 3,000 mg, about 10 mg to about 2,500 mg, about 20 mg to about 2,000 mg, about 25 mg to about 1,500 mg, about 50 mg to about 1,000 mg, about 75 mg to about 900 mg, about 100 mg to about 800 mg, about 250 mg to about 750 mg, about 300 mg to about 600 mg, about 400 mg to about 500 mg, and any and all whole or partial increments there between.

[0328] In some embodiments, the dose of a compound of the invention is from about 1 mg and about 2,500 mg. In some embodiments, a dose of a compound of the invention used in compositions described herein is less than about 10,000 mg, or less than about 8,000 mg, or less than about 6,000 mg, or less than about 5,000 mg, or less than about 3,000 mg, or less than about 2,000 mg, or less than about 1,000 mg, or less than about 500 mg, or less than about 200 mg, or less than about 50 mg. Similarly, in some embodiments, a dose of a second compound (i.e., a drug used for treating the same or another disease as that treated by the compositions of the invention) as described herein is less than about 1,000 mg, or less than about 800 mg, or less than about 600 mg, or less than about 500 mg, or less than about 400 mg, or less than about 300 mg, or less than about 200 mg, or less than about 100 mg, or less than about 50 mg, or less than about 40 mg, or less than about 30 mg, or less than about 25 mg, or less than about 20 mg, or less than about 15 mg, or less than about 10 mg, or less than about 5 mg, or less than about 2 mg, or less than about 1 mg, or less than about 0.5 mg, and any and all whole or partial increments thereof.

[0329] In one embodiment, the present invention is directed to a packaged pharmaceutical composition comprising a container holding a therapeutically effective amount of a compound or conjugate of the invention, alone or in combination with a second pharmaceutical agent; and instructions for using the compound or conjugate to treat, prevent, or reduce one or more symptoms of a disease in a subject.

[0330] The term “container” includes any receptacle for holding the pharmaceutical composition. For example, in one embodiment, the container is the packaging that contains the pharmaceutical composition. In other embodiments, the container is not the packaging that contains the pharmaceutical composition, i.e., the container is a receptacle, such as a box or vial that contains the packaged pharmaceutical composition or unpackaged pharmaceutical composition and the instructions for use of the pharmaceutical composition. Moreover, packaging techniques are well known in the art. It should be understood that the instructions for use of the pharmaceutical composition may be contained on the packaging containing the pharmaceutical composition, and as such the instructions form an increased functional relationship to the packaged product. However, it should be understood that the instructions may contain information pertaining to the compound's ability to perform its intended function, e.g., treating or preventing a disease in a subject, or delivering an imaging or diagnostic agent to a subject.

[0331] Routes of administration of any of the compositions of the invention include oral, nasal, parenteral, sublingual, transdermal, transmucosal (e.g., sublingual, lingual, (trans)buccal, and (intra)nasal,), intravesical, intraduodenal, intragastrical, rectal, intra-peritoneal, subcutaneous, intramuscular, intradermal, intra-arterial, intravenous, or administration.

[0332] Suitable compositions and dosage forms include, for example, tablets, capsules, caplets, pills, gel caps, troches, dispersions, suspensions, solutions, syrups, granules, beads, transdermal patches, gels, powders, pellets, magmas, lozenges, creams, pastes, plasters, lotions, discs, suppositories, liquid sprays for nasal or oral administration, dry powder or aerosolized formulations for inhalation, compositions and formulations for intravesical administration and the like. It should be understood that the formulations and compositions that would be useful in the present invention are not limited to the particular formulations and compositions that are described herein.

### Methods of Generating Tandem Arrays

[0333] The present invention provides a method of generating a tandem array of the invention. For example, in one embodiment, the tandem array can be generated in a single step. In one embodiment, the generation of the tandem array allows for full-length array transcription.

[0334] In one embodiment, the method comprises ligating at least two crRNA sequences, wherein each crRNA sequence comprises a unique direct repeat sequence (DR), wherein the ligation generates the tandem array. In one embodiment, each DR sequence comprises a unique mutation in the poly T stretch of SEQ ID NO: 267. For example, in one embodiment, each DR sequence comprises a unique mutation at T17 or T18 of SEQ ID NO: 267. In one embodiment, one crRNA sequence comprises a wild type DR sequence and each additional crRNA sequence comprises a DR sequence having unique mutation in the poly T stretch of SEQ ID NO: 267. In one embodiment, each DR sequence is independently selected from SEQ ID NOs:268-274.

### Methods of Decreasing RNA & Methods of Treatment

[0335] In one aspect, the disclosure provides methods of decreasing the number of one or more RNA transcripts in a subject. In one embodiment, the method decrease the number of two or more RNA transcripts in a subject. In one embodiment, the two or more RNA transcripts in a subject are related. For example, in one embodiment, the two or more RNA transcripts are each viral transcripts of the same virus. In one embodiment, the two or more RNA transcripts are each involved the same cellular pathway.

[0336] In one embodiment, RNA is localized in the cytoplasm In one embodiment, the RNA is localized in the nucleus. In one embodiment, RNA is localized in an organelle. For example, in one embodiment, the methods decrease RNA localized in the nucleolus, ribosome, vesicle, rough endoplasmic reticulum, Golgi apparatus, cytoskeleton, smooth endoplasmic reticulum, mitochondria, vacuole, cytosol, lysosome, or centriole. In one embodiment, the methods decrease cell-membrane associated RNA. In one embodiment, the methods decrease extracellular RNA.

[0337] In one embodiment, the method comprises administering to the subject (1) a nucleic acid molecule encoding a fusion protein of the disclosure comprising a Cas protein and optionally a localization sequence, such as an NLS, NES or organelle localization signal, or a fusion protein of the disclosure comprising a Cas protein and optionally a localization sequence, such as an NLS, NES, or organelle localization signal; and (2) a nucleic acid molecule encoding a crRNA array comprising two or more crRNA.

[0338] In some embodiments, the RNA cytoplasmic. In such embodiments, the method comprises administering to the subject (1) a protein of the disclosure comprising a Cas protein and a NES or a nucleic acid molecule encoding a protein of the disclosure comprising a Cas protein and a NES; and (2) a nucleic acid molecule encoding a crRNA array comprising two or more crRNA.

[0339] In some embodiments, the RNA nuclear. In such embodiments, the method comprises administering to the subject (1) a protein of the disclosure comprising a Cas protein and a NLS or a nucleic acid molecule encoding a protein of the disclosure comprising a Cas protein and a NLS; and (2) a nucleic acid molecule encoding a crRNA array comprising two or more crRNA.

[0340] In one embodiment, the subject is a cell. In one embodiment, the cell is a prokaryotic cell or eukaryotic cell. In one embodiment, the cell is a eukaryotic cell. In one embodiment, the cell is a plant, animal, or fungi cell. In one embodiment, the cell is a plant cell. In one embodiment, the cell is an animal cell. In one embodiment, the cell is a yeast cell.

[0341] In one embodiment, the subject is a mammal. For example, in one embodiment, the subject is a human, non-human primate, dog, cat, horse, cow, goat, sheep, rabbit, pig, rat, or mouse. In one embodiment, the subject is a non-mammalian subject. For example, in one embodiment, the subject is a zebrafish, fruit fly, or roundworm.

[0342] In one embodiment, the amount of viral RNA is reduced in vitro. In one embodiment, the amount of viral RNA is reduced in vivo.

[0343] In one aspect, the present invention provides methods cleaving of a one or more target viral RNA in a subject. In one embodiment, the method comprises administering to the subject (1) a nucleic acid molecule encoding a protein of the disclosure comprising a Cas protein and optionally a localization sequence, such as an NLS, NES, or organelle localization signal, or a protein of the disclosure comprising a Cas protein and optionally a localization sequence, such as an NLS, NES, or organelle localization signal; and (2) a nucleic acid molecule encoding a crRNA array comprising two or more crRNA, wherein each crRNA independently comprises a sequence substantially complementary to a RNA sequence in the target viral RNA.

### Methods of Treatment and Use

[0344] The present invention provides methods of treating, reducing the symptoms of, and/or reducing the risk of developing a disease or disorder in a subject. For example, in one embodiment, methods of the invention of treat, reduce the symptoms of, and/or reduce the risk of developing a disease or disorder in a mammal. In one embodiment, the methods of the invention of treat, reduce the symptoms of, and/or reduce the risk of developing a disease or disorder in a plant. In one embodiment, the methods of the invention of treat, reduce the symptoms of, and/or reduce the risk of developing a disease or disorder in a yeast organism.

[0345] In one embodiment, the subject is a cell. In one embodiment, the cell is a prokaryotic cell or eukaryotic cell. In one embodiment, the cell is a eukaryotic cell. In one embodiment, the cell is a plant, animal, or fungi cell. In one embodiment, the cell is a plant cell. In one embodiment, the cell is an animal cell. In one embodiment, the cell is a yeast cell.

[0346] In one embodiment, the subject is a mammal. For example, in one embodiment, the subject is a human, non-human primate, dog, cat, horse, cow, goat, sheep, rabbit, pig, rat, or mouse. In one embodiment, the subject is a non-mammalian subject. For example, in one embodiment, the subject is a zebrafish, fruit fly, or roundworm.

[0347] In one embodiment, the disease or disorder is caused by an activation of a cellular pathway. In some embodiments, the cellular pathway lead, for example, to aberrant control of cellular processes, with uncontrolled growth and increased cell survival. For example, in one embodiment, each crRNA independently comprises a sequence substantially complementary to an mRNA sequence within the RAS, JAK-STAT, PI3K/AKT, or MAPK cellular pathway.

[0348] In one embodiment, the method comprises administering to the subject (1) a protein of the disclosure or a nucleic acid molecule encoding a protein of the disclosure, and (2) a nucleic acid molecule encoding a crRNA array comprising two or more crRNA, wherein each crRNA independently comprises a sequence substantially complementary to a nucleotide sequence of a RNA transcript of the pathway. In one embodiment, the crRNA array comprising two or more crRNA, wherein each crRNA independently comprises a sequence substantially complementary to a nucleotide sequence of an mRNA sequence within the RAS, JAK-STAT, PI3K/AKT, or MAPK cellular pathway. In one embodiment, the Cas protein cleaves the RNA transcript(s).

[0349] In one embodiment, the disease or disorder includes, but is not limited to, cancer, heart disease, atherosclerosis, cardiac fibrosis, cardiac arrhythmia, hypertension, respiratory disease, stroke, Alzheimer's disease, diabetes, nephritis, liver disease.

[0350] In one embodiment, the disease or disorder the infection of virus infection. In one embodiment, the disease or disorder is caused by an virus infection. In one embodiment, the virus infection is infection of an RNA virus. For example, in one embodiment, the virus infection is infection of a positive sense ssRNA virus, a negative sense ssRNA virus, adsRNA virus, or a ssRNA-RT virus. In one embodiment, the virus infection is infection of an DNA virus. For example, in one embodiment, the virus infection is infection of a dsDNA virus, a ssDNA virus, or a dsDNA-RT virus. Thus, in one embodiment, the disease or disorder is may be treated, reduced, or the risk can be reduced via an element that prevents or reduces a viral RNA transcript. Thus, in one embodiment, the disease or disorder is may be treated, reduced, or the risk can be reduced via an element that prevents or reduces viral mRNA transcript, or prevents or reduces translation of viral protein.

[0351] In one embodiment, the method comprises administering to the subject (1) a protein of the disclosure or a nucleic acid molecule encoding a protein of the disclosure, and (2) a nucleic acid molecule encoding a crRNA array comprising two or more crRNA, wherein each crRNA independently comprises a sequence substantially complementary to a nucleotide sequence complimentary to a viral RNA transcript. In one embodiment, the Cas protein cleaves the viral RNA transcript.

[0352] In one embodiment, the virus is an RNA virus. In one embodiment, the virus produces RNA during its lifecycle. In one embodiment, the virus is a human virus, a plant virus or an animal virus. Exemplary viruses include, but are not limited to, viruses of families Adenoviridae, Adenoviridae, Alphaflexiviridae, Anelloviridae, Arenavirus, Arteriviridae, Asfarviridae, Astroviridae, Benyviridae, Betaflexiviridae, Birnaviridae, Bornaviridae, Bromoviridae, Caliciviridae, Caulimoviridae, Circoviridae, Closteroviridae, Coronaviridae, Filoviridae, Flaviviridae, Geminiviridae, Hantaviridae, Hepadnaviridae, Hepeviridae, Herpesviridae, Kitaviridae, Luteoviridae, Nairoviridae, Nanoviridae, Nimaviridae, Orthomyxoviridae, Paramyxoviridae, Phenuiviridae, Picornaviridae, Polyomaviridae, Pospiviridae, Potyviridae, Poxviridae, Reoviridae, Retroviridae, Retrovirus, Rhabdoviridae, Secoviridae, Togaviridae, Tombusviridae, Tospoviridae, Tymoviridae, and Virgaviridae. For example, exemplary viruses include, but are not limited to, African swine fever, Avian hepatitis E, Avian infectious laryngotracheitis, Avian nephritis virus, Bamboo mosaic virus, Banana bunchy top virus, Barley stripe mosaic virus, Barley yellow dwarf virus, Potato leafroll virus, Borna disease, Brome mosaic virus, wheat, Cauliflower mosaic virus, Chikungunya, Eastern equine encephalitis virus, Citrus leprosis, Citrus sudden death associated virus, Citrus tristeza virus, Coconut cadang-cadang viroid, Curly top virus, African cassava mosaic virus, Cytomegalovirus, Epstein-Barr virus, Dengue, Yellow fever, West Nile, Zika, Ebola virus, Marburg virus, Equine arteritis virus, Porcine reproductive and respiratory syndrome virus, Equine infectious anemia, Foot and mouth disease, Foot and mouth disease, Enteroviruses, Rhinoviruses, Hepatitis B virus, Hepatitis E virus, HIV, HIV-1, HIV-2, Infectious bursal disease virus (poultry), Infectious pancreatic necrosis (salmon), Infectious canine hepatitis, aviadenoviruses of fowl, Influenza viruses, Lassa virus, Lymphocytic choriomeningitis virus, Monkeypox, Nairobi sheep disease, Newcastle disease virus (poultry), Norwalk virus, Numerous examples of crop damaging viruses, including Potato virus Y, Porcine circovirus 2, Beak and feather disease virus (poultry), Potato virus M, Rabies virus, Respiratory and enteric adenoviruses, Respiratory syncytial virus, Rice stripe necrosis virus, Rift Valley fever, rotaviruses, SARS-CoV-2, MERS, Sheeppox virus, Lumpy skin disease virus, Sin Nombre virus, Andes virus, SV40, Tobacco ringspot virus, Tomato bushy stunt virus, Tomato spotted wilt virus, Torque teno virus, Venezuelan equine encephalitis virus, Vesicular stomatitis Indiana virus, Viral hemorrhagic septicemia (trout), and White spot syndrome virus (shrimp).

[0353] In one embodiment, exemplary viruses include, but are not limited to, Primate T-lymphotropic virus 1, Primate T-lymphotropic virus 2, Primate T-lymphotropic virus 3, Human immunodeficiency virus 1, Human immunodeficiency virus 2, Simian foamy virus, Human picobirnavirus, Colorado tick fever virus, Changuinola virus, Great Island virus, Lebombo virus, Orungo virus, Rotavirus A, Rotavirus B, Rotavirus C, Banna virus, Borna disease virus, Lake Victoria Marburgvirus, Reston ebolavirus, Sudan ebolavirus, Tai forest ebolavirus, Zaire virus, Human parainfluenza virus 2, Human parainfluenza virus 4, Mumps virus, Newcastle disease virus, Human parainfluenza virus 1, Human parainfluenza virus 3, Hendra virus, Nipah virus, Measles virus, Human respiratory syncytial virus, Human metapneumovirus, Chandipura virus, Isfahan virus, Piry virus, Vesicular stomatitis Alagoas virus, Vesicular stomatitis Indiana virus, Vesicular stomatitis New Jersey virus, Australian bat lyssavirus, Duvenhage virus, European bat lyssavirus 1, European bat lyssavirus 2, Mokola virus, Rabies virus, Guanarito virus, Junin virus, Lassa virus, Lymphocytic choriomeningitis virus, Machupo virus, Pichinde virus, Sabia virus, Whitewater Arroyo virus, Bunyamwera virus, Bwamba virus, California encephalitis virus, Caraparu virus, Catu virus, Guama virus, Guaroa virus, Kairi virus, Marituba virus, Oriboca virus, Oropouche virus, Shuni virus, Tacaiuma virus, Wyeomyia virus, Andes virus, Bayou virus, Black creek canal virus, Dobrava-Belgrade virus, Hantaan virus, Laguna Negra virus, New York virus, Puumala virus, Seoul virus, Sin Nombre virus, Crimean-Congo haemorrhagic fever virus, Dugbe virus, Candiru virus, Punta Toro virus, Rift Valley fever virus, Sandfly fever Naples virus, Influenza A virus, Influenza B virus, Influenza C virus, Dhori virus, Thogoto virus, Hepatitis delta virus, Human coronavirus 229E, Human coronavirus NL63, Human coronavirus HKU1, Human coronavirus 0C43, SARS coronavirus, Human torovirus, Human enterovirus A, Human enterovirus B, Human enterovirus C, Human enterovirus D, Human rhinovirus A, Human rhinovirus B, Human rhinovirus C, Encephalomyocarditis virus, Theilovirus, Equine rhinitis A virus, Foot and mouth disease virus, Hepatitis A virus, Human parechovirus, Ljungan virus, Aichi virus, Human astrovirus, Human astrovirus 2, Human astrovirus 3, Human astrovirus 4, Human astrovirus 5, Human astrovirus 6, Human astrovirus 7, Human astrovirus 8, Norwalk virus, Sapporo virus, Aroa virus, Banzi virus, Dengue virus, Ilheus virus, Japanese encephalitis virus, Kokobera virus, Kyasanur forest disease virus, Louping ill virus, Murray Valley encephalitis virus, Ntaya virus, Omsk haemorrhagic fever virus, Powassan virus, Rio Bravo virus, St Louis encephalitis virus, Tick-borne encephalitis virus, Usutu virus, Wesselsbron virus, West Nile virus, Yellow fever virus, Zika virus, Hepatitis C virus, Hepatitis E virus, Barmah Forest virus, Chikungunya virus, Eastern equine encephalitis virus, Everglades virus, Getah virus, Mayaro virus, Mucambo virus, O'nyong-nyong virus, Pixuna virus, Ross River virus, Semliki Forest virus, Sindbis virus, Venezuelan equine encephalitis virus, Western equine encephalitis virus, Whataroa virus, Rubella virus.

[0354] In one embodiment, exemplary viruses include, but are not limited to, Ranid herpesvirus 1, Ranid herpesvirus 2, Ranid herpesvirus 3, Anguillid herpesvirus 1, Cyprinid herpesvirus 1, Cyprinid herpesvirus 2, Cyprinid herpesvirus 3, Acipenserid herpesvirus 2, Ictalurid herpesvirus 1, Ictalurid herpesvirus 2, Salmonid herpesvirus 1, Salmonid herpesvirus 2, Salmonid herpesvirus 3, Gallid alphaherpesvirus 1, Psittacid alphaherpesvirus 1, Anatid alphaherpesvirus 1, Columbid alphaherpesvirus 1, Gallid alphaherpesvirus 2, Gallid alphaherpesvirus 3, Meleagrid alphaherpesvirus 1, Spheniscid alphaherpesvirus 1, Chelonid alphaherpesvirus 5, Testudinid alphaherpesvirus 3, Ateline alphaherpesvirus 1, Bovine alphaherpesvirus 2, Cercopithecine alphaherpesvirus 2, Human alphaherpesvirus 1, Human alphaherpesvirus 2, Leporid alphaherpesvirus 4, Macacine alphaherpesvirus 1, Macropodid alphaherpesvirus 1, Macropodid alphaherpesvirus 2, Panine alphaherpesvirus 3, Papiine alphaherpesvirus 2, Pteropodid alphaherpesvirus 1, Saimiriine alphaherpesvirus 1, Bovine alphaherpesvirus 1, Bovine alphaherpesvirus 5, Bubaline alphaherpesvirus 1, Canid alphaherpesvirus 1, Caprine alphaherpesvirus 1, Cercopithecine alphaherpesvirus 9, Cervid alphaherpesvirus 1, Cervid alphaherpesvirus 2, Equid alphaherpesvirus 1, Equid alphaherpesvirus 3, Equid alphaherpesvirus 4, Equid alphaherpesvirus 8, Equid alphaherpesvirus 9, Felid alphaherpesvirus 1, Human alphaherpesvirus 3, Monodontid alphaherpesvirus 1, Phocid alphaherpesvirus 1, Suid alphaherpesvirus 1, Chelonid alphaherpesvirus 6, Aotine betaherpesvirus 1, Cebine betaherpesvirus 1, Cercopithecine betaherpesvirus 5, Human betaherpesvirus 5, Macacine betaherpesvirus 3, Macacine betaherpesvirus 8, Mandrilline betaherpesvirus 1, Panine betaherpesvirus 2, Papiine betaherpesvirus 3, Papiine betaherpesvirus 4, Saimiriine betaherpesvirus 4, Murid betaherpesvirus 1, Murid betaherpesvirus 2, Murid betaherpesvirus 8, Elephantid betaherpesvirus 1, Elephantid betaherpesvirus 4, Elephantid betaherpesvirus 5, Human betaherpesvirus 7, Human betaherpesvirus 6A, Human betaherpesvirus 6B, Macacine betaherpesvirus 9, Murid betaherpesvirus 3, Suid betaherpesvirus 2, Caviid betaherpesvirus 2, Tupaiid betaherpesvirus 1, Callitrichine gammaherpesvirus 3, Cercopithecine gammaherpesvirus 14, Gorilline gammaherpesvirus 1, Human gammaherpesvirus 4, Macacine gammaherpesvirus 4, Macacine gammaherpesvirus 10, Panine gammaherpesvirus 1, Papiine gammaherpesvirus 1, Pongine gammaherpesvirus 2, Alcelaphine gammaherpesvirus 1, Alcelaphine gammaherpesvirus 2, Bovine gammaherpesvirus 6, Caprine gammaherpesvirus 2, Hippotragine gammaherpesvirus 1, Ovine gammaherpesvirus 2, Suid gammaherpesvirus 3, Suid gammaherpesvirus 4, Suid gammaherpesvirus 5, Equid gammaherpesvirus 2, Equid gammaherpesvirus 5, Felid gammaherpesvirus 1, Mustelid gammaherpesvirus 1, Phocid gammaherpesvirus 3, Vespertilionid gammaherpesvirus 1, Ateline gammaherpesvirus 2, Ateline gammaherpesvirus 3, Bovine gammaherpesvirus 4, Cricetid gammaherpesvirus 2, Human gammaherpesvirus 8, Macacine gammaherpesvirus 5, Macacine gammaherpesvirus 8, Macacine gammaherpesvirus 11, Macacine gammaherpesvirus 12, Murid gammaherpesvirus 4, Murid gammaherpesvirus 7, Saimiriine gammaherpesvirus 2, Equid gammaherpesvirus 7, Phocid gammaherpesvirus 2, Saguinine gammaherpesvirus 1, Iguanid herpesvirus 2, Haliotid herpesvirus 1, Ostreid herpesvirus 1, Salmonella virus SKML39, Shigella virus AG3, Dickeya virus Limestone, Dickeya virus RC2014, Escherichia virus CBA120, Escherichia virus PhaxI, Salmonella virus 38, Salmonella virus Det7, Salmonella virus GG32, Salmonella virus PM10, Salmonella virus SFP10, Salmonella virus SH19, Salmonella virus SJ3, Escherichia virus KWBSE43-6, Klebsiella virus 0507KN21, Klebsiella virus KpS110, Klebsiella virus May, Klebsiella virus Menlow, Serratia virus IME250, Erwinia virus Ea2809, Serratia virus MAM1, Acinetobacter virus Acibe1007, Acinetobacter virus AB3, Acinetobacter virus AbKT21III, Acinetobacter virus Abp1, Acinetobacter virus Aci07, Acinetobacter virus Aci08, Acinetobacter virus AS11, Acinetobacter virus AS12, Acinetobacter virus Fri1, Acinetobacter virus IME200, Acinetobacter virus PD6A3, Acinetobacter virus PDAB9, Acinetobacter virus phiAB1, Acinetobacter virus SH-Ab 15519, Acinetobacter virus SWHAb1, Acinetobacter virus SWHAb3, Acinetobacter virus WCHABP5, Acintetobacter virus B1, Acintetobacter virus B2, Acintetobacter virus B5, Acintetobacter virus D2, Acintetobacter virus P1, Acintetobacter virus P2, Acintetobacter virus phiAB6, Acinetobacter virus Petty, Vibrio virus Vc1, Vibrio virus A318, Vibrio virus AS51, Vibrio virus Vp670, Marinomonas virus CBSA, Marinomonas virus CPP1m, Vibrio virus VEN, Pseudomonas virus Achelous, Pseudomonas virus Alpheus, Pseudomonas virus Nerthus, Pseudomonas virus Njord, Pseudomonas virus uligo, Pseudomonas virus C171, Pectobacterium virus PP16, Pectobacterium virus PPWS1, Pectobacterium virus PPWS2, Pectobacterium virus CBS, Pectobacterium virus Clickz, Pectobacterium virus fM1, Pectobacterium virus Gaspode, Pectobacterium virus Khlen, Pectobacterium virus Koot, Pectobacterium virus Lelidair, Pectobacterium virus Nobby, Pectobacterium virus Peat1, Pectobacterium virus Phoria, Pectobacterium virus PP90, Pectobacterium virus Zenivior, Dickeya virus BF25-12, Pseudomonas virus NV3, Pseudomonas virus 130-113, Pseudomonas virus 15pyo, Pseudomonas virus Ab05, Pseudomonas virus ABTNL, Pseudomonas virus DL62, Pseudomonas virus kF77, Pseudomonas virus LKD16, Pseudomonas virus LUZ19, Pseudomonas virus MPK6, Pseudomonas virus MPK7, Pseudomonas virus NFS, Pseudomonas virus PAXYB1, Pseudomonas virus phiKMV, Pseudomonas virus PT2, Pseudomonas virus PTS, Pseudomonas virus RLP, Pseudomonas virus LKA1, Pseudomonas virus f2, Aeromonas virus 25AhydR2PP, Aeromonas virus AS7, Aeromonas virus ZPAH7, Yersinia virus ISAO8, Aeromonas virus Ahp1, Aeromonas virus CF7, Cronobacter virus DevCD23823, Cronobacter virus GAP227, Salmonella virus Spp16, Yersinia virus R8-01, Yersinia virus fHeYen301, Yersinia virus Phi80-18, Pectobacterium virus Arno160, Pectobacterium virus PP2, Proteus virus PM85, Proteus virus PM93, Proteus virus PM116, Proteus virus Pm5460, Pectobacterium virus PP1, Erwinia virus Era103, Erwinia virus S2, Lelliottia virus phD2B, Citrobacter CrRp3, Escherchia virus LL11, Escherichia virus AAPEc6, Escherichia virus ACGC91, Escherichia virus B, Escherichia virus C, Escherichia virus K, Escherichia virus K1-5, Escherichia virus K1E, Escherichia virus mutPK1A2, Escherichia virus VEc3, Escherichia virus UAB78, Salmonella virus BP12B, Salmonella virus SP6, Burkholderia virus BpAMP1, Ralstonia virus RSPI1, Ralstonia virus RSB1, Ralstonia virus RsoP1IDN, Burkholderia virus JG068, Ralstonia virus RSJ2, Ralstonia virus RSJ5, Ralstonia virus RSPII1, Shigella virus Buco, Escherichia virus Minorna, Klebsiella virus AltoGao, Klebsiella virus BO1E, Klebsiella virus F19, Klebsiella virus K244, Klebsiella virus Kp2, Klebsiella virus KP34, Klebsiella virus KPRio2015, Klebsiella virus KpS2, Klebsiella virus KpV41, Klebsiella virus KpV48, Klebsiella virus KpV71, Klebsiella virus KpV74, Klebsiella virus KpV475, Klebsiella virus KPV811, Klebsiella virus myPSH1235, Klebsiella virus SU503, Klebsiella virus SU552A, Shigella virus SFN6B, Enterobacter virus KDA1, Proteus virus PM16, Proteus virus PM75, Dickeya virus Dagda, Dickeya virus Katbat, Dickeya virus Luksen, Dickeya virus Mysterion, Yersinia virus AP10, Erwinia virus FE44, Escherichia virus 285P, Escherichia virus BA14, Escherichia virus P483, Escherichia virus P694, Escherichia virus S523, Kluyvera virus Kvp1, Pectobacterium virus PP74, Salmonella virus BP12A, Salmonella virus BSP161, Shigella virus A7, Yersinia virus Berlin, Yersinia virus PYPS50, Yersinia virus Yepe2, Yersinia virus Yepf, Citrobacter virus CR8, Vibrio virus ICP3, Vibrio virus N4, Vibrio virus VP4, Enterobacter virus Eap1, Erwinia virus L1, Escherichia virus SRT7, Pseudomonas virus 17A, Pseudomonas virus gh1, Pseudomonas virus Henninger, Pseudomonas virus KNP, Pseudomonas virus Pf1ERZ2017, Pseudomonas virus PhiPSA2, Pseudomonas virus PhiPsa17, Pseudomonas virus PPPL1, Pseudomonas virus sh12, Pseudomonas virus WRT, Yersinia virus fPS9, Yersinia virus fPS53, Yersinia virus fPS59, Yersinia virus fPS54ocr, Pectobacterium virus Jarilo, Citrobacter virus CR44b, Citrobacter virus SH3, Citrobacter virus SH4, Cronobacter virus Dev2, Cronobacter virus GW1, Enterobacter virus EcpYZU01, Escherichia virus EcoDS1, Escherichia virus F, Escherichia virus GA2A, Escherichia virus IMM002, Escherichia virus K1F, Escherichia virus LM33P1, Escherichia virus PE3-1, Escherichia virus Ro451w, Escherichia virus ST31, Escherichia virus Vec13, Escherichia virus YZ1, Escherichia virus ZG49, Shigella virus SFPH2, Morganella virus MmP1, Morganella virus MP2, Dickeya virus JA10, Dickeya virus Ninurta, Pectobacterium virus PP47, Pectobacterium virus PP81, Pectobacterium virus PPWS4, Pseudomonas virus PPpW4, Pseudomonas virus 22PfluR64PP, Pseudomonas virus IBBPF7A, Pseudomonas virus Pf10, Pseudomonas virus PFP1, Pseudomonas virus PhiS1, Pseudomonas virus UNOSLW1, Pseudomonas virus PspYZU08, Escherichia virus K30, Klebsiella virus 2044-307w, Klebsiella virus BIS33, Klebsiella virus Henu1, Klebsiella virus IL33, Klebsiella virus IME205, Klebsiella virus IME321, Klebsiella virus K5, Klebsiella virus K11, Klebsiella virus K5-2, Klebsiella virus K5-4, Klebsiella virus KN1-1, Klebsiella virus KN3-1, Klebsiella virus KN4-1, Klebsiella virus Kp1, Klebsiella virus KP32, Klebsiella virus KP32i192, Klebsiella virus KP32i194, Klebsiella virus KP32i195, Klebsiella virus KP32i196, Klebsiella virus kpssk3, Klebsiella virus KpV289, Klebsiella virus KpV763, Klebsiella virus KpV766, Klebsiella virus KpV767, Klebsiella virus Pharr, Klebsiella virus PRA33, Klebsiella virus SHKp152234, Klebsiella virus SHKp152410, Citrobacter virus CFP1, Citrobacter virus SH1, Citrobacter virus SH2, Enterobacter virus E2, Enterobacter virus E3, Enterobacter virus KPN3, Enterobacteria virus T7M, Escherichia virus ECA2, Escherichia virus LL2, Escherichia virus T3, Escherichia virus T3Luria, Leclercia virus 10164-302, Salmonella virus SG-JL2, Serratia virus 2050H2, Serratia virus SM9-3Y, Yersinia virus APS, Yersinia virus YeF10, Yersinia virus YeO3-12, Enterobacteria virus IME390, Escherichia virus 13a, Escherichia virus 64795ec1, Escherichia virus C5, Escherichia virus CICC80001, Escherichia virus Ebrios, Escherichia virus EG1, Escherichia virus HZ2R8, Escherichia virus HZP2, Escherichia virus N30, Escherichia virus NCA, Escherichia virus T7, Salmonella virus 3A8767, Salmonella virus Vi06, Stenotrophomonas virus IME15, Yersinia virus YpPY, Yersinia virus YpsPG, Pseudomonas virus Phil5, Pectobacterium virus DUPPII, Synechococcus virus SCBP42, Aquamicrobium virus P14, Ashivirus S45C4, Agrobacterium virus Atuph02, Agrobacterium virus Atuph03, Ralstonia virus Ap1, Ayaqvirus S45C18, Prochlorococcus virus SS120-1, Pseudomonas virus Andromeda, Pseudomonas virus Bf7, Escherichia virus J8-65, Escherichia virus Lidtsur, Prochlorococcus virus NATL1A7, Chosvirus KM23C739, Rhizobium virus RHEph02, Rhizobium virus RHEph08, Rhizobium virus RHEph09, Vibrio virus Cyclit, Escherichia virus PGT2, Escherichia virus PhiKT, Alteromonas virus H4-4, Foussvirus S46C10, Fussvirus S30C28, Escherichia virus ECBP5, Pectobacterium virus PP99, Ralstonia virus DURPI, Ralstonia virus RsoP1EGY, Synechococcus STIP37, Jalkavirus S08C159, Ralstonia virus RSB3, Kawavirus SWcelC56, Synechococcus virus SRIP1, Providencia virus PS3, Curvibacter virus P26059B, Ralstonia virus RSB2, Synechococcus virus SCBP2, Krakvirus S39C11, Podovirus Lau218, Pantoea virus LIMElight, Prochlorococcus virus PGSP1, Synechococcus virus SCBP3, Caulobacter virus Lullwater, Vibrio virus KF1, Vibrio virus KF2, Vibrio virus OWB, Vibrio virus VP93, Pseudomonas virus VSW3, Nohivirus S31C1, Oinezvirus S37C6, Rhizobium virus RHEph01, Pagavirus S05C849, Mesorhizobium virus Lo5R7ANS, Pedosvirus S28C3, Pekhitvirus S04C24, Pelagibacter virus HTVC019P, Pelagivirus S35C6, Caulobacter virus Percy, Delftia virus IMEDE1, Podivirus S05C243, Pseudomonas virus PollyC, Synechococcus virus SCBP4, Powvirus S08C41, Xanthomonas virus f20, Xanthomonas virus f30, Xanthomonas virus XAJ24, Xanthomonas virus Xc 10, Xylella virus Prado, Synechococcus virus SB28, Sphingomonas virus Scott, Synechococcus virus SRIP2, Ralstonia virus ITL1, Sieqvirus S42C7, Ralstonia virus RPSC1, Stopalavirus S38C3, Pelagibacter virus HTVC011P, Stupnyavirus KM16C193, Prochlorococcus virus 951510a, Prochlorococcus virus NATL2A133, Prochlorococcus virus PSSP10, Vibrio virus JSF7, Prochlorococcus virus PSSP7, Synechococcus virus P60, Prochlorococcus virus PSSP3, Synechococcus virus PSSP2, Synechococcus virus Syn5, Votkovvirus S28C10, Pantoea virus LIMEzero, Pasteurella virus PHB01, Pasteurella virus PHB02, Escherichia virus GJ1, Escherichia virus ST32, Erwinia virus Faunus, Erwinia virus Y2, Aeromonas virus pAh6C, Pectobacterium virus PM1, Pectobacterium virus PP101, Shewanella virus Spp001, Shewanella virus SppYZU05, Vibrio virus Ceto, Vibrio virus Thalassa, Vibrio virus JSF10, Vibrio virus JSF12, Vibrio virus phi3, Vibrio virus pVp1, Escherichia virus EPS7, Escherichia virus mar003J3, Escherichia virus saus132, Salmonella virus 123, Salmonella virus 329, Salmonella virus 118970sa12, Salmonella virus LVR16A, Salmonella virus S113, Salmonella virus S114, Salmonella virus S116, Salmonella virus S124, Salmonella virus S126, Salmonella virus S132, Salmonella virus S133, Salmonella virus S147, Salmonella virus Seafire, Salmonella virus SH9, Salmonella virus STG2, Salmonella virus Stitch, Salmonella virus Sw2, Yersinia virus phiR201, Escherichia virus AKFV33, Escherichia virus BF23, Escherichia virus chee24, Escherichia virus DT5712, Escherichia virus DT57C, Escherichia virus FFH1, Escherichia virus Gostya9, Escherichia virus H8, Escherichia virus mar004NP2, Escherichia virus OSYSP, Escherichia virus phiAPCEc03, Escherichia virus phiLLS, Escherichia virus slur09, Escherichia virus T5, Salmonella virus NR01, Salmonella virus S131, Salmonella virus Shivani, Salmonella virus SP01, Salmonella virus SP3, Salmonella virus SPC35, Shigella virus SHSML45, Shigella virus SSP1, Pectobacterium virus DUPPV, Pectobacterium virus My1, Proteus virus PM135, Proteus virus Stubb, Vibrio virus PG07, Vibrio virus VspSw1, Aeromonas virus AhSzq1, Aeromonas virus AhSzw1, Klebsiella virus IME260, Klebsiella virus Sugarland, Escherichia virus IME542, Escherichia virus ACGM12, Escherichia virus EC3a, Escherichia virus DTL, Escherichia virus IME253, Escherichia virus Rtp, Shigella virus Sf12, Escherichia virus phiEB49, Escherichia virus AHP42, Escherichia virus AHS24, Escherichia virus AKS96, Escherichia virus C119, Escherichia virus E41c, Escherichia virus Eb49, Escherichia virus Jk06, Escherichia virus KP26, Escherichia virus phiJLA23, Escherichia virus Rogue1, Shigella virus Sd1, Shigella virus pSf1, Citrobacter virus DK2017, Citrobacter virus Sazh, Citrobacter virus Stevie, Escherichia virus LLS, Escherichia virus TLS, Salmonella virus 36, Salmonella virus PHB07, Salmonella virus phSE2, Salmonella virus SP126, Salmonella virus YSP2, Escherichia virus 95, Escherichia virus mar001J1, Escherichia virus mar002J2, Escherichia virus SECphi27, Escherichia virus swan01, Escherichia virus IME347, Escherichia virus SRT8, Escherichia virus ADB2, Escherichia virus BIFF, Escherichia virus IME18, Escherichia virus JMPW1, Escherichia virus JMPW2, Escherichia virus SH2, Escherichia virus T1, Shigella virus 008, Shigella virus ISF001, Shigella virus PSf2, Shigella virus Sfin1, Shigella virus SH6, Shigella virus Shfl1, Shigella virus ISF002, Cronobacter virus Esp2949-1, Enterobacter virus EcL1, Cronobacter virus PhiCS01, Escherichia virus ESC041, Pantoea virus AAS23, Escherichia virus NBD2, Enterobacter virus F20, Klebsiella virus 1513, Klebsiella virus GHK3, Klebsiella virus KLPN1, Klebsiella virus KOX1, Klebsiella virus KP36, Klebsiella virus KpCol1, Klebsiella virus KpKT21phi1, Klebsiella virus KPN N141, Klebsiella virus KpV522, Klebsiella virus MezzoGao, Klebsiella virus NJR15, Klebsiella virus NJS1, Klebsiella virus NJS2, Klebsiella virus PKP126, Klebsiella virus Sushi, Klebsiella virus TAH8, Klebsiella virus TSK1, Bacillus virus Agate, Bacillus virus Bobb, Bacillus virus Bp8pC, Bacillus virus Bastille, Bacillus virus CAM003, Bacillus virus Evoli, Bacillus virus HoodyT, Bacillus virus AvesoBmore, Bacillus virus B4, Bacillus virus Bigbertha, Bacillus virus Riley, Bacillus virus Spock, Bacillus virus Troll, Bacillus virus Bc431, Bacillus virus Bcp1, Bacillus virus BCP82, Bacillus virus BM15, Bacillus virus Deepblue, Bacillus virus JBP901, Bacillus virus Grass, Bacillus virus NIT1, Bacillus virus SPG24, Bacillus virus BCP78, Bacillus virus TsarBomba, Bacillus virus BPS13, Bacillus virus BPS10C, Bacillus virus Hakuna, Bacillus virus Megatron, Bacillus virus WPh, Bacillus virus Mater, Bacillus virus Moonbeam, Bacillus virus SIOphi, Enterococcus virus ECP3, Enterococcus virus EF24C, Enterococcus virus EFLK1, Enterococcus virus EFDG1, Enterococcus virus EFP01, Enterococcus virus EfV12, Listeria virus A511, Listeria virus AG20, Listeria virus List36, Listeria virus LMSP25, Listeria virus LMTA34, Listeria virus LMTA148, Listeria virus LP048, Listeria virus LP064, Listeria virus LP083-2, Listeria virus P100, Listeria virus WILL Bacillus virus Camphawk, Bacillus virus SPO1, Bacillus virus CP51, Bacillus virus JL, Bacillus virus Shanette, Staphylococcus virus BS1, Staphylococcus virus BS2, Lactobacillus virus Bacchae, Lactobacillus virus Bromius, Lactobacillus virus Iacchus, Lactobacillus virus Lpa804, Lactobacillus virus Semele, Staphylococcus virus G1, Staphylococcus virus G15, Staphylococcus virus JD7, Staphylococcus virus K, Staphylococcus virus MCE2014, Staphylococcus virus P108, Staphylococcus virus Rodi, Staphylococcus virus S253, Staphylococcus virus S25-4, Staphylococcus virus SA12, Staphylococcus virus Sb1, Staphylococcus virus SscM1, Staphylococcus virus IPLAC1C, Staphylococcus virus SEP1, Staphylococcus virus Remus, Staphylococcus virus SA11, Staphylococcus virus Stau2, Staphylococcus virus Twort, Brochothrix virus A9, Lactobacillus virus Lb338-1, Lactobacillus virus LP65, Campylobacter virus CP21, Campylobacter virus CP220, Campylobacter virus CPt10, Campylobacter virus IBB35, Campylobacter virus CP81, Campylobacter virus CP30A, Campylobacter virus CPX, Campylobacter virus Los1, Campylobacter virus NCTC12673, Escherichia virus Alf5, Escherichia virus AYO145A, Escherichia virus EC6, Escherichia virus HY02, Escherichia virus JH2, Escherichia virus TP1, Escherichia virus VpaE1, Escherichia virus wV8, Salmonella virus BPS15Q2, Salmonella virus BPS17L1, Salmonella virus BPS17W1, Salmonella virus FelixO1, Salmonella virus Mushroom, Salmonella virus Si3, Salmonella virus SP116, Salmonella virus UAB87, Erwinia virus Ea214, Erwinia virus M7, Citrobacter virus Moogle, Citrobacter virus Mordin, Shigella virus Sf13, Shigella virus Sf14, Shigella virus Sf17, Escherichia virus SUSP1, Escherichia virus SUSP2, Ralstonia virus RSA1, Ralstonia virus RSY1, Mannheimia virus 1127AP1, Mannheimia virus PHL101, Aeromonas virus phiO18P, Vibrio virus Canoe, Pseudoalteromonas virus C5a, Pseudomonas virus Dobby, Pseudomonas virus phiCTX, Erwinia virus EtG, Escherichia virus 186, Salmonella virus PsP3, Salmonella virus SEN1, Erwinia virus ENT90, Klebsiella virus 4LV2017, Salmonella virus Fels2, Salmonella virus RE2010, Salmonella virus SEN8, Salmonella virus SopEphi, Haemophilus virus HP1, Haemophilus virus HP2, Vibrio virus Kappa, Pasteurella virus F108, Burkholderia virus KS14, Burkholderia virus AP3, Burkholderia virus KS5, Vibrio virus K139, Burkholderia virus ST79, Escherichia virus fiAA91ss, Escherichia virus P2, Escherichia virus pro147, Escherichia virus pro483, Escherichia virus Wphi, Yersinia virus L413C, Pseudomonas virus phi3, Salinivibrio virus SMHB1, Klebsiella virus 3LV2017, Salmonella virus SEN4, Cronobacter virus ESSI2, Stenotrophomonas virus Smp131, Salmonella virus FSLSP004, Burkholderia virus KL3, Burkholderia virus phi52237, Burkholderia virus phiE122, Burkholderia virus phiE202, Vibrio virus PV94, Escherichia virus P88, Escherichia virus Bp7, Escherichia virus IME08, Escherichia virus JS10, Escherichia virus J598, Escherichia virus MX01, Escherichia virus QL01, Escherichia virus VR5, Escherichia virus WG01, Escherichia virus VR7, Escherichia virus VR20, Escherichia virus VR25, Escherichia virus VR26, Shigella virus SP18, Salmonella virus Melville, Salmonella virus S16, Salmonella virus STML198, Salmonella virus STP4a, Klebsiella virus JD18, Klebsiella virus PKO111, Enterobacter virus PG7, Escherichia virus CC31, Escherichia virus ECD7, Escherichia virus GEC3S, Escherichia virus JSE, Escherichia virus phi1, Escherichia virus RB49, Citrobacter virus CF1, Citrobacter virus Merlin, Citrobacter virus Moon, Escherichia virus APCEc01, Escherichia virus HP3, Escherichia virus HX01, Escherichia virus JS09, Escherichia virus 0157tp3, Escherichia virus 0157tp6, Escherichia virus PhAPEC2, Escherichia virus RB69, Escherichia virus ST0, Shigella virus SHSML521, Shigella virus UTAM, Vibrio virus KVP40, Vibrio virus nt1, Vibrio virus ValKK3, Enterobacter virus Eap3, Klebsiella virus KP15, Klebsiella virus KP27, Klebsiella virus Matisse, Klebsiella virus Miro, Klebsiella virus PMBT1, Escherichia virus AR1, Escherichia virus C40, Escherichia virus CF2, Escherichia virus E112, Escherichia virus ECML134, Escherichia virus HY01, Escherichia virus HY03, Escherichia virus Ime09, Escherichia virus RB3, Escherichia virus RB14, Escherichia virus slur03, Escherichia virus slur04, Escherichia virus T4, Shigella virus Pss1, Shigella virus Sf21, Shigella virus Sf22, Shigella virus Sf24, Shigella virus SHBML501, Shigella virus Shfl2, Yersinia virus D1, Yersinia virus PST, Acinetobacter virus 133, Aeromonas virus 65, Aeromonas virus Aeh1, Escherichia virus RB16, Escherichia virus RB32, Escherichia virus RB43, Pseudomonas virus 42, Escherichia virus Av05, Cronobacter virus CR3, Cronobacter virus CR8, Cronobacter virus CR9, Cronobacter virus PBES02, Pectobacterium virus phiTE, Cronobacter virus GAP31, Escherichia virus 4MG, Salmonella virus PVPSE1, Salmonella virus SSE121, Escherichia virus APECc02, Escherichia virus FFH2, Escherichia virus FV3, Escherichia virus JES2013, Escherichia virus Murica, Escherichia virus slur16, Escherichia virus V5, Escherichia virus V18, Brevibacillus virus Abouo, Brevibacillus virus Davies, Synechococcus virus SMbCM100, Erwinia virus Deimos, Erwinia virus Desertfox, Erwinia virus Ea35-70, Erwinia virus RAY, Erwinia virus Simmy50, Erwinia virus SpecialG, Synechococcus virus SShM2, Klebsiella virus K64-1, Klebsiella virus RaK2, Dickeya virus AD1, Erwinia virus Alexandra, Lactobacillus virus LBR48, Synechococcus virus SCAM1, Synechococcus virus SCBWM1, Vibrio virus Aphrodite 1, Escherichia virus 121Q, Eschierichia virus PBECO4, Synechococcus virus AC2014fSyn7803C8, Synechococcus virus ACG2014f, Synechococcus virus ACG2014fSyn7803US26, Synechococcus virus STIM5, Pseudomonas virus PaBG, Rheinheimera virus Barba18A, Rheinheimera virus Barba19A, Rheinheimera virus Barba21A, Rheinheimera virus Barba5S, Rheinheimera virus Barba8S, Burkholderia virus BcepMu, Burkholderia virus phiE255, Synechococcus virus Bellamy, Gordonia virus GMA6, Aeromonas virus 44RR2, Mycobacterium virus Alice, Mycobacterium virus Bxz1, Mycobacterium virus Dandelion, Mycobacterium virus HyRo, Mycobacterium virus 13, Mycobacterium virus Lukilu, Mycobacterium virus Nappy, Mycobacterium virus Sebata, Faecalibacterium virus Brigit, Prochlorococcus virus Syn33, Synechococcus virus SRIM12-01, Synechococcus virus SRIM12-06, Synechococcus virus SRIM12-08, Salmonella virus SEN34, Acidovorax virus ACP17, Xanthomonas virus Carpasina, Xanthomonas virus XcP1, Pseudomonas virus pf16, Synechococcus virus SCAM3, Ralstonia virus RSF1, Ralstonia virus RSL2, Synechococcus virus SWAM2, Erwinia virus Derbicus, Pseudomonas virus EL, Sinorhizobium virus M7, Sinorhizobium virus M12, Sinorhizobium virus N3, Serratia virus BF, Yersinia virus Yen9-04, Faecalibacterium virus Epona, Erwinia virus Asesino, Erwinia virus EaH2, Prochlorococcus virus MED4-213, Prochlorococcus virus PHM1, Prochlorococcus virus PHM2, Flavobacterium virus FCL2, Flavobacterium virus FCV1, Pseudomonas virus KIL2, Pseudomonas virus KIL4, Edwardsiella virus GF2, Escherichia virus Goslar, Halomonas virus HAP1, Vibrio virus VP882, Lactobacillus virus Lb, Erwinia virus EaH1, Iodobacter virus PLPE, Delftia virus PhiW14, Klebsiella virus JD001, Klebsiella virus KpV52, Klebsiella virus KpV80, Escherichia virus CVM10, Escherichia virus EC0078, Escherichia virus ep3, Brevibacillus virus Jimmer, Brevibacillus virus Osiris, Synechococcus virus SCAMS, Rhizobium virus RHEph4, Faecalibacterium virus Lagaffe, Synechoccus virus SP4, Synechococcus virus Syn30, Prochlorococcus virus PTIM40, Synechococcus virus SSKS1, Salmonella virus ZCSE2, Clostridium virus phiC2, Clostridium virus phiCD27, Clostridium virus phiCD119, Erwinia virus Machina, Arthrobacter virus BarretLemon, Arthrobacter virus Beans, Arthrobacter virus Brent, Arthrobacter virus Jawnski, Arthrobacter virus Martha, Arthrobacter virus Piccoletto, Arthrobacter virus Shade, Arthrobacter virus Sonny, Synechococcus virus SCAM7, Acinetobacter virus ME3, Ralstonia virus RSL1, Cronobacter virus GAP32, Pectinobacterium virus CBB, Faecalibacterium virus Mushu, Escherichia virus Mu, Shigella virus SfMu, Halobacterium virus phiH, Burkholderia virus Bcep1, Burkholderia virus Bcep43, Burkholderia virus Bcep781, Burkholderia virus BcepNY3, Xanthomonas virus OP2, Synechococcus virus SMbCM6, Pseudomonas virus Ab03, Pseudomonas virus G1, Pseudomonas virus KPP10, Pseudomonas virus PAKP3, Pseudomonas virus PS24, Synechococcus virus SRIM8, Synechococcus virus SRIM50, Synechococcus virus ACG2014bSyn7803C61, Synechococcus virus ACG2014bSyn9311C4, Synechococcus virus SRIM2, Synechococcus virus SPM2, Pseudomonas virus Noxifer, Acinetobacter virus AB1, Acinetobacter virus AB2, Acinetobacter virus AbC62, Acinetobacter virus AbP2, Acinetobacter virus AP22, Acinetobacter virus LZ35, Acinetobacter virus WCHABP1, Acinetobacter virus WCHABP12, Pseudomonas virus Psa374, Pseudomonas virus VCM, Pseudomonas virus CAb1, Pseudomonas virus CAb02, Pseudomonas virus JG004, Pseudomonas virus MAGI, Pseudomonas virus PA10, Pseudomonas virus PAKP1, Pseudomonas virus PAKP2, Pseudomonas virus PAKP4, Pseudomonas virus PaP1, Pseudomonas virus phiMK, Pseudomonas virus Zigelbrucke, Prochlorococcus virus PSSM7, Burkholderia virus BcepF1, Pseudomonas virus 141, Pseudomonas virus Ab28, Pseudomonas virus CEBDP1, Pseudomonas virus DL60, Pseudomonas virus DL68, Pseudomonas virus E215, Pseudomonas virus E217, Pseudomonas virus F8, Pseudomonas virus JG024, Pseudomonas virus KPP12, Pseudomonas virus KTN6, Pseudomonas virus LBL3, Pseudomonas virus LMA2, Pseudomonas virus NH4, Pseudomonas virus PAS, Pseudomonas virus PB1, Pseudomonas virus PS44, Pseudomonas virus SN, Pectinobacterium virus PEAT2, Edwardsiella virus pEtSU, Bordetella virus PHB04, Escherichia phage ESCO13, Escherichia virus ESCO5, Escherichia virus phAPEC8, Escherichia virus Schickermooser, Klebsiella virus ZCKP1, Pseudomonas virus PA7, Pseudomonas virus phiKZ, Pseudomonas virus SL2, Pseudomonas virus PMW, Agrobacterium virus Atuph07, Synechococcus virus Syn19, Aeromonas virus 56, Aeromonas virus 43, Escherichia virus P1, Escherichia virus RCS47, Salmonella virus SJ46, Pseudoalteromonas virus J2-1, Arthrobacter virus ArV1, Arthrobacter virus Colucci, Arthrobacter virus Trina, Ralstonia virus RP12, Erwinia virus Risingsun, Salmonella virus BP63, Acinetobacter virus Aci05, Acinetobacter virus Aci01-1, Acinetobacter virus Aci02-2, Prochlorococcus virus PSSM2, Dickeya virus JA11, Dickeya virus JA29, Erwinia virus Y3, Agrobacterium virus 7-7-1, Salmonella virus SPN3US, Bacillus virus Shbh1, Bacillus virus 1, Geobacillus virus GBSV1, Pseudomonas virus tabernarius, Synechococcus virus ST4, Faecalibacterium virus Taranis, Synechococcus virus SIOM18, Yersinia virus R1RT, Yersinia virus TG1, Synechococcus virus STIM4, Synechococcus virus SSM1, Bacillus virus SP15, Vibrio virus pTD1, Vibrio virus VP4B, Tetrasphaera virus TJE1, Faecalibacterium virus Toutatis, Aeromonas virus 25, Aeromonas virus Aes12, Aeromonas virus Aes508, Aeromonas virus AS4, Aeromonas virus Asgz, Stenotrophomonas virus IME13, Prochlorococcus virus Syn1, Synechococcus virus SRIM44, Vibrio virus MAR, Vibrio virus VHML, Vibrio virus VP585, Escherichia virus ECML4, Salmonella virus Marshall, Salmonella virus Maynard, Salmonella virus SJ2, Salmonella virus STML131, Salmonella virus Vi1, Erwinia virus Wellington, Escherichia virus ECML-117, Escherichia virus FEC19, Escherichia virus WFC, Escherichia virus WFH, Serratia virus CHI14, Edwardsiella virus MSW3, Edwardsiella virus PEi21, Erwinia virus Yoloswag, Bacillus virus G, Bacillus virus PBS1, Microcystis virus Ma-LMM01, Streptococcus virus Cp1, Streptococcus virus Cp1, Lactococcus virus WP2, Bacillus virus B103, Bacillus virus GA1, Bacillus virus phi29, Kurthia virus 6, Actinomyces virus Av1, Mycoplasma virus P1, Staphylococcus virus Andhra, Staphylococcus virus St134, Staphylococcus virus 66, Staphylococcus virus 44AHJD, Staphylococcus virus BP39, Staphylococcus virus CSA13, Staphylococcus virus GRCS, Staphylococcus virus Pabna, Staphylococcus virus phiAGO13, Staphylococcus virus PSa3, Staphylococcus virus S24-1, Staphylococcus virus SAP2, Staphylococcus virus SCH1, Staphylococcus virus SLPW, Shigella virus 7502Stx, Shigella virus POCJ13, Escherichia virus 191, Escherichia virus PA2, Escherichia virus TL2011, Shigella virus VASD, Escherichia virus 24B, Escherichia virus 933W, Escherichia virus Min27, Escherichia virus PA28, Escherichia virus Stx2 II, Dinoroseobacter virus DFL12, Pseudomonas virus Bjorn, Pseudomonas virus Ab22, Pseudomonas virus CHU, Pseudomonas virus LUZ24, Pseudomonas virus PAA2, Pseudomonas virus PaP3, Pseudomonas virus PaP4, Pseudomonas virus TL, Vibrio virus VC8, Vibrio virus VP2, Vibrio virus VP5, Escherichia virus N4, Flavobacterium virus Fpv1, Flavobacterium virus Fpv4, Streptococcus virus C1, Escherichia virus APECS, Escherichia virus APEC7, Escherichia virus Bp4, Escherichia virus EC1UPM, Escherichia virus ECBP1, Escherichia virus G7C, Escherichia virus IME11, Shigella virus Sb1, Escherichia virus C1302, Pseudomonas virus F116, Pseudomonas virus H66, Escherichia virus Pollock, Salmonella virus FSL SP-058, Salmonella virus FSL SP-076, Arthrobacter virus Adat, Arthrobacter virus Jasmine, Erwinia virus Ea9-2, Erwinia virus Frozen, Achromobacter virus Axp3, Achromobacter virus JWAlpha, Edwardsiella virus KF1, Burkholderia virus KL4, Pseudomonas virus KPP25, Pseudomonas virus R18, Pseudomonas virus tf, Escherichia virus 172-1, Escherichia virus ECB2, Escherichia virus NJ01, Escherichia virus phiEco32, Escherichia virus Septima11, Escherichia virus SU10, Escherichia virus HK620, Salmonella virus BTP1, Salmonella virus P22, Salmonella virus SE1Spa, Salmonella virus ST64T, Shigella virus Sf6, Burkholderia virus Bcep22, Burkholderia virus Bcepi102, Burkholderia virus Bcepmigl, Burkholderia virus DC1, Cellulophaga virus Cba41, Cellulophaga virus Cba172, Pseudomonas virus Ab09, Pseudomonas virus LIT1, Pseudomonas virus PA26, Pseudomonas virus KPP21, Pseudomonas virus LUZ7, Vibrio virus 48B1, Vibrio virus 51A6, Vibrio virus 51A7, Vibrio virus 52B1, Myxococcus virus Mx8, Bacillus virus Page, Bacillus virus Palmer, Bacillus virus Pascal, Bacillus virus Pony, Bacillus virus Pookie, Brucella virus Pr, Brucella virus Tb, Bordetella virus BPP1, Burkholderia virus BcepC6B, Helicobacter virus 1961P, Helicobacter virus KHP30, Helicobacter virus KHP40, Pseudomonas virus phCDa, Escherichia virus Skarpretter, Escherichia virus Sortsne, Klebsiella virus IME279, Escherichia virus phiV10, Salmonella virus Epsilon15, Salmonella virus SPN1S, Pseudomonas virus NV1, Pseudomonas virus UFVP2, Escherichia virus PTXU04, Hamiltonella virus APSE1, Lactococcus virus KSY1, Phormidium virus WMP3, Phormidium virus WMP4, Pseudomonas virus 119X, Roseobacter virus SIO1, Vibrio virus VpV262, Streptomyces virus ELB20, Streptomyces virus R4, Streptomyces virus Amela, Streptomyces virus phiCAM, Streptomyces virus Aaronocolus, Streptomyces virus Caliburn, Streptomyces virus Danzina, Streptomyces virus Hydra, Streptomyces virus Izzy, Streptomyces virus Lannister, Streptomyces virus Lika, Streptomyces virus Sujidade, Streptomyces virus Zemlya, Streptomyces virus phiHau3, Mycobacterium virus Acadian, Mycobacterium virus Baee, Mycobacterium virus Reprobate, Mycobacterium virus Adawi, Mycobacterium virus Bane 1, Mycobacterium virus BrownCNA, Mycobacterium virus Chrisnmich, Mycobacterium virus Cooper, Mycobacterium virus JAMaL, Mycobacterium virus Nigel, Mycobacterium virus Stinger, Mycobacterium virus Vincenzo, Mycobacterium virus Zemanar, Mycobacterium virus Apizium, Mycobacterium virus Manad, Mycobacterium virus Oline, Mycobacterium virus Osmaximus, Mycobacterium virus Pg1, Mycobacterium virus Soto, Mycobacterium virus Suffolk, Mycobacterium virus Athena, Mycobacterium virus Bernardo, Mycobacterium virus Gadjet, Mycobacterium virus Pipefish, Mycobacterium virus Godines, Mycobacterium virus Rosebush, Mycobacterium virus TA17a, Mycobacterium virus Babsiella, Mycobacterium virus Brujita, Mycobacterium virus Hawkeye, Mycobacterium virus Plot, Caulobacter virus CcrBL9, Caulobacter virus CcrSC, Caulobacter virus CcrColossus, Caulobacter virus CcrPW, Caulobacter virus CcrBL10, Caulobacter virus CcrRogue, Caulobacter virus phiCbK, Caulobacter virus Swift, Salmonella virus SP31, Salmonella virus AG11, Salmonella virus Ent1, Salmonella virus f18SE, Salmonella virus Jersey, Salmonella virus L13, Salmonella virus LSPA1, Salmonella virus SE2, Salmonella virus SETP3, Salmonella virus SETP7, Salmonella virus SETP13, Salmonella virus SP101, Salmonella virus SS3e, Salmonella virus wks13, Escherichia virus K1G, Escherichia virus K1H, Escherichia virus K1ind1, Escherichia virus K1ind2, Esherichia virus Golestan, Raoultella virus RP180, Gordonia virus Asapag, Gordonia virus BENtherdunthat, Gordonia virus Getalong, Gordonia virus Kenna, Gordonia virus Horus, Gordonia virus Phistory, Leuconostoc virus Lmd1, Leuconostoc virus LN03, Leuconostoc virus LN04, Leuconostoc virus LN12, Leuconostoc virus LN6B, Leuconostoc virus P793, Leuconostoc virus 1A4, Leuconostoc virus Ln8, Leuconostoc virus Ln9, Leuconostoc virus LN25, Leuconostoc virus LN34, Leuconostoc virus LNTR3, Mycobacterium virus Bongo, Mycobacterium virus Rey, Mycobacterium virus Butters, Mycobacterium virus Michelle, Mycobacterium virus Charlie, Mycobacterium virus Pipsqueaks, Mycobacterium virus Xeno, Mycobacterium virus Panchino, Mycobacterium virus Phrann, Mycobacterium virus Redi, Mycobacterium virus Skinnyp, Gordonia virus BaxterFox, Gordonia virus Yeezy, Gordonia virus Kita, Gordonia virus Nymphadora, Gordonia virus Zirinka, Mycobacterium virus Bignuz, Mycobacterium virus Brusacoram, Mycobacterium virus Donovan, Mycobacterium virus Fishburne, Mycobacterium virus Jebeks, Mycobacterium virus Malithi, Mycobacterium virus Phayonce, Lactobacillus virus B2, Lactobacillus virus Lenus, Lactobacillus virus Nyseid, Lactobacillus virus SAC12, Lactobacillus virus Ldl1, Lactobacillus virus ViSo2018a, Lactobacillus virus Maenad, Lactobacillus virus P1, Lactobacillus virus Satyr, Streptomyces virus AbbeyMikolon, Pseudomonas virus Ab18, Pseudomonas virus Ab19, Pseudomonas virus PaMx11, Burkholderia virus AH2, Arthrobacter virus Amigo, Arthrobacteria virus Molivia, Propionibacterium virus Anatole, Propionibacterium virus B3, Arthrobacter virus Andrew, Bacillus virus Andromeda, Bacillus virus Blastoid, Bacillus virus Curly, Bacillus virus Eoghan, Bacillus virus Finn, Bacillus virus Glittering, Bacillus virus Riggi, Bacillus virus Taylor, Microbacterium virus Appa, Gordonia virus Apricot, Microbacterium virus Armstrong, Gordonia virus Attis, Streptomyces virus Attoomi, Streptomyces virus Austintatious, Streptomyces virus Ididsumtinwong, Streptomyces virus PapayaSalad, Gordonia virus Bantam, Mycobacterium virus Barnyard, Mycobacterium virus Konstantine, Mycobacterium virus Predator, Pseudomonas virus B3, Pseudomonas virus JBD67, Pseudomonas virus JD18, Pseudomonas virus PM105, Mycobacterium virus Bernal13, Gordonia virus BetterKatz, Streptomyces virus Bing, Staphylococcus virus 13, Staphylococcus virus 77, Staphylococcus virus 108PVL, Gordonia virus Bowser, Arthrobacter virus Bridgette, Arthrobacter virus Constance, Arthrobacter virus Eileen, Arthrobacter virus Judy, Arthrobacter virus Peas, Gordonia virus Britbrat, Mycobacterium virus Bron, Mycobacterium virus Faith1, Mycobacterium virus JoeDirt, Mycobacterium virus Rumpelstiltskin, Streptococcus virus 858, Streptococcus virus 2972, Streptococcus virus ALQ132, Streptococcus virus 01205, Streptococcus virus Sfi11, Pseudomonas virus D3112, Pseudomonas virus DMS3, Pseudomonas virus FHA0480, Pseudomonas virus LPB1, Pseudomonas virus MP22, Pseudomonas virus MP29, Pseudomonas virus MP38, Pseudomonas virus PA1KOR, Cellulophaga virus ST, Bacillus virus 250, Bacillus virus IEBH, Lactococcus virus bIL67, Lactococcus virus c2, Corynebacterium virus C3PO, Corynebacterium virus Darwin, Corynebacterium virus Zion, Lactobacillus virus c5, Lactobacillus virus Ld3, Lactobacillus virus Ld17, Lactobacillus virus Ld25A, Lactobacillus virus LLKu, Lactobacillus virus phiLdb, Mycobacterium virus Che9c, Mycobacterium virus Sbash, Mycobacterium virus Ardmore, Mycobacterium virus Avani, Mycobacterium virus Boomer, Mycobacterium virus Che8, Mycobacterium virus Che9d, Mycobacterium virus DeadP, Mycobacterium virus Dlane, Mycobacterium virus Dorothy, Mycobacterium virus DotProduct, Mycobacterium virus Drago, Mycobacterium virus Fruitloop, Mycobacterium virus GUmbie, Mycobacterium virus Ibhubesi, Mycobacterium virus Llij, Mycobacterium virus Mozy, Mycobacterium virus Mutaforma13, Mycobacterium virus Pacc40, Mycobacterium virus PMC, Mycobacterium virus Ramsey, Mycobacterium virus RockyHorror, Mycobacterium virus SG4, Mycobacterium virus Shaunal, Mycobacterium virus Shilan, Mycobacterium virus Spartacus, Mycobacterium virus Taj, Mycobacterium virus Tweety, Mycobacterium virus Wee, Mycobacterium virus Yoshi, Salmonella virus Chi, Salmonella virus FSLSP030, Salmonella virus FSLSP088, Salmonella virus iEPS5, Salmonella virus SPN19, Corynebacterium virus P1201, Clavibacter virus CMP1, Clavibacter virus CN1A, Lactobacillus virus ATCC8014, Lactobacillus virus phiTh1, Pediococcus virus cIP1, Arthrobacter virus Coral, Arthrobacter virus Kepler, Mycobacterium virus Corndog, Mycobacterium virus Firecracker, Rhodobacter virus RcCronus, Gordonia virus DareDevil, Arthrobacter virus Decurro, Stenotrophomonas virus DLP5, Gordonia virus Demosthenes, Gordonia virus Katyusha, Gordonia virus Kvothe, Pseudomonas virus D3, Pseudomonas virus PMG1, Escherichia virus EK99P1, Escherichia virus HK578, Escherichia virus JL1, Escherichia virus SSL2009a, Escherichia virus YD2008s, Shigella virus EP23, Sodalis virus S01, Microbacterium virus Dismas, Propionibacterium virus B22, Propionibacterium virus Doucette, Propionibacterium virus E6, Propionibacterium virus G4, Microbacterium virus Eden, Enterococcus virus AL2, Enterococcus virus AL3, Enterococcus virus AUEF3, Enterococcus virus EcZZ2, Enterococcus virus EF3, Enterococcus virus EF4, Enterococcus virus EfaCPT1, Enterococcus virus IME196, Enterococcus virus LY0322, Enterococcus virus phiSHEF2, Enterococcus virus phiSHEF4, Enterococcus virus phiSHEF5, Enterococcus virus PMBT2, Enterococcus virus SANTOR1, Edwardsiella virus eiAU, Xanthomonas virus PhiL7, Microbacterium virus Eleri, Gordonia virus Cozz, Gordonia virus Emalyn, Gordonia virus GTE2, Gordonia virus Troje, Gordonia virus Eyre, Gordonia virus Fairfaxidumvirus, Microbacterium virus ISF9, Erwinia virus Eho49, Erwinia virus Eho59, Staphylococcus virus 2638A, Staphylococcus virus QT1, Colwellia virus 9A, Mycobacterium virus Alma, Mycobacterium virus Arturo, Mycobacterium virus Astro, Mycobacterium virus Backyardigan, Mycobacterium virus Benedict, Mycobacterium virus Bethlehem, Mycobacterium virus Billknuckles, Mycobacterium virus BPBiebs31, Mycobacterium virus Bruns, Mycobacterium virus Bxb1, Mycobacterium virus Bxz2, Mycobacterium virus Che12, Mycobacterium virus Cuco, Mycobacterium virus D29, Mycobacterium virus Doom, Mycobacterium virus Ericb, Mycobacterium virus Euphoria, Mycobacterium virus George, Mycobacterium virus Gladiator, Mycobacterium virus Goose, Mycobacterium virus Hammer, Mycobacterium virus Heldan, Mycobacterium virus Jasper, Mycobacterium virus JC27, Mycobacterium virus Jeffabunny, Mycobacterium virus JHC117, Mycobacterium virus KBG, Mycobacterium virus Kssjeb, Mycobacterium virus Kugel, Mycobacterium virus L5, Mycobacterium virus Lesedi, Mycobacterium virus LHTSCC, Mycobacterium virus lockley, Mycobacterium virus Marcell, Mycobacterium virus Microwolf, Mycobacterium virus Mrgordo, Mycobacterium virus Museum, Mycobacterium virus Nepal, Mycobacterium virus Packman, Mycobacterium virus Peaches, Mycobacterium virus Perseus, Mycobacterium virus Pukovnik, Mycobacterium virus Rebeuca, Mycobacterium virus Redrock, Mycobacterium virus Ridgecb, Mycobacterium virus Rockstar, Mycobacterium virus Saintus, Mycobacterium virus Skipole, Mycobacterium virus Solon, Mycobacterium virus Switzer, Mycobacterium virus SWU1, Mycobacterium virus Tiger, Mycobacterium virus Timshel, Mycobacterium virus Trixie, Mycobacterium virus Turbido, Mycobacterium virus Twister, Mycobacterium virus U2, Mycobacterium virus Violet, Mycobacterium virus Wonder, Mycobacterium virus Gaia, Arthrobacter virus Abidatro, Arthrobacter virus Galaxy, Gordonia virus GAL1, Gordonia virus GMA3, Gordonia virus Gsput1, Gordonia virus GMAT, Gordonia virus GTE7, Gordonia virus Ghobes, Mycobacterium virus Giles, Microbacterium virus OneinaGillian, Gordonia virus GodonK, Microbacterium virus Goodman, Arthrobacter virus Captnmurica, Arthrobacter virus Gordon, Gordonia virus GordTnk2, Proteus virus Isfahan, Gordonia virus Jumbo, Gordonia virus Gustav, Gordonia virus Mandia, Paenibacillus virus Harrison, Gordonia virus Hedwig, Cellulophaga virus Cba121, Cellulophaga virus Cba171, Cellulophaga virus Cba181, Escherichia virus HK022, Escherichia virus HK75, Escherichia virus HK97, Escherichia virus HK106, Escherichia virus HK446, Escherichia virus HK542, Escherichia virus HK544, Escherichia virus HK633, Escherichia virus mEp234, Escherichia virus mEpX1, Escherichia virus mEpX2, Streptomyces virus Hiyaa, Salinibacter virus M1EM1, Salinibacter virus M8CR30-2, Listeria virus LP26, Listeria virus LP37, Listeria virus LP110, Listeria virus LP114, Listeria virus P70, Corynebacterium virus phi673, Corynebacterium virus phi674, Microbacterium virus Hamlet, Microbacterium virus Ilzat, Polaribacter virus P12002L, Polaribacter virus P12002S, Nonlabens virus P12024L, Nonlabens virus P12024S, Gordonia virus Jace, Brevibacillus virus Jenst, Corynebacterium virus Juicebox, Salinibacter virus M31CR41-2, Salinibacter virus SRUTV1, Arthrobacter virus Kellezzio, Arthrobacter virus Kitkat, Burkholderia virus KL1, Xanthomonas virus CP1, Microbacterium virus Golden, Microbacterium virus Koji, Arthrobacter virus Bennie, Arthrobacter virus DrRobert, Arthrobacter virus Glenn, Arthrobacter virus HunterDalle, Arthrobacter virus Joann, Arthrobacter virus Korra, Arthrobacter virus Preamble, Arthrobacter virus Pumancara, Arthrobacter virus Wayne, Mycobacterium virus 244, Mycobacterium virus Bask21, Mycobacterium virus CJW1, Mycobacterium virus Eureka, Mycobacterium virus Kostya, Mycobacterium virus Porky, Mycobacterium virus Pumpkin, Mycobacterium virus Sirduracell, Mycobacterium virus Toto, Microbacterium virus Krampus, Salinibacter virus M8CC19, Salinibacter virus M8CRM1, Sphingobium virus Lacusarx, Escherichia virus DE3, Escherichia virus HK629, Escherichia virus HK630, Escherichia virus Lambda, Pseudomonas virus Lana, Arthrobacter virus Laroye, Eggerthella virus PMBT5, Arthobacter virus Liebe, Mycobacterium virus Halo, Mycobacterium virus Liefie, Acinetobacter virus IMEAB3, Acinetobacter virus Loki, Streptomyces virus phiBT1, Streptomyces virus phiC31, Brevibacterium virus LuckyBarnes, Gordonia virus Lucky10, Faecalibacterium virus Lugh, Bacillus virus BMBtp2, Bacillus virus TP21, Bacillus virus Mgbh1, Arthrobacter virus Maja, Arthrobacter virus DrManhattan, Mycobacterium virus Ff47, Mycobacterium virus Muddy, Vibrio virus MAR10, Vibrio virus SSP002, Mycobacterium virus Marvin, Mycobacterium virus Mosmoris, Pseudomonas virus PMBT3, Microbacterium virus MementoMori, Microbacterium virus Fireman, Microbacterium virus Metamorphoo, Microbacterium virus RobsFeet, Microbacterium virus Mint, Streptococcus virus 7201, Streptococcus virus DT1, Streptococcus virus phiAbc2, Streptococcus virus Sfi19, Streptococcus virus Sfi21, Gordinia virus Birksandsocks, Gordonia virus Flakey, Gordonia virus Monty, Gordonia virus Stevefrench, Arthrobacter virus Circum, Arthrobacter virus Mudcat, Escherichia virus EC2, Salmonella virus Lumpael, Dinoroseobacter virus DSC, Burkholderia virus BcepNazgul, Microbacterium virus Neferthena, Pseudomonas virus nickie, Pseudomonas virus NP1, Pseudomonas virus PaMx25, Escherichia virus 9g, Escherichia virus JenK1, Escherichia virus JenP1, Escherichia virus JenP2, Salmonella virus SE1Kor, Salmonella virus 9NA, Salmonella virus SP069, Gordonia virus Nyceirae, Faecalibacterium virus Oengus, Mycobacterium virus Baka, Mycobacterium virus Courthouse, Mycobacterium virus Littlee, Mycobacterium virus Omega, Mycobacterium virus Optimus, Mycobacterium virus Thibault, Gordonia virus BrutonGaster, Gordonia virus OneUp, Gordonia virus Orchid, Thermus virus P23-45, Thermus virus P74-26, Propionibacterium virus ATCC29399BC, Propionibacterium virus ATCC29399BT, Propionibacterium virus Attacne, Propionibacterium virus Keiki, Propionibacterium virus Kubed, Propionibacterium virus Lauchelly, Propionibacterium virus MrAK, Propionibacterium virus Ouroboros, Propionibacterium virus P91, Propionibacterium virus P105, Propionibacterium virus P144, Propionibacterium virus P1001, Propionibacterium virus P1.1, Propionibacterium virus P100A, Propionibacterium virus P100D, Propionibacterium virus P101A, Propionibacterium virus P104A, Propionibacterium virus PA6, Propionibacterium virus Pacnes201215, Propionibacterium virus PAD20, Propionibacterium virus PAS50, Propionibacterium virus PHL009M11, Propionibacterium virus PHL025M00, Propionibacterium virus PHL037M02, Propionibacterium virus PHL041M10, Propionibacterium virus PHL060L00, Propionibacterium virus PHL067M01, Propionibacterium virus PHL070N00, Propionibacterium virus PHL071N05, Propionibacterium virus PHL082M03, Propionibacterium virus PHL092M00, Propionibacterium virus PHL095N00, Propionibacterium virus PHL111M01, Propionibacterium virus PHL112N00, Propionibacterium virus PHL113M01, Propionibacterium virus PHL114L00, Propionibacterium virus PHL116M00, Propionibacterium virus PHL117M00, Propionibacterium virus PHL117M01, Propionibacterium virus PHL132N00, Propionibacterium virus PHL141N00, Propionibacterium virus PHL151M00, Propionibacterium virus PHL151N00, Propionibacterium virus PHL152M00, Propionibacterium virus PHL163M00, Propionibacterium virus PHL171M01, Propionibacterium virus PHL179M00, Propionibacterium virus PHL194M00, Propionibacterium virus PHL199M00, Propionibacterium virus PHL301M00, Propionibacterium virus PHL308M00, Propionibacterium virus Pirate, Propionibacterium virus Procrass1, Propionibacterium virus SKKY, Propionibacterium virus Solid, Propionibacterium virus Stormborn, Propionibacterium virus Wizzo, Pseudomonas virus PaMx28, Pseudomonas virus PaMx74, Mycobacterium virus Papyrus, Mycobacterium virus Send513, Mycobacterium virus Patience, Mycobacterium virus PBI1, Rhodococcus virus Pepy6, Rhodococcus virus Poco6, Staphylococcus virus 11, Staphylococcus virus 29, Staphylococcus virus 37, Staphylococcus virus 53, Staphylococcus virus 55, Staphylococcus virus 69, Staphylococcus virus 71, Staphylococcus virus 80, Staphylococcus virus 85, Staphylococcus virus 88, Staphylococcus virus 92, Staphylococcus virus 96, Staphylococcus virus 187, Staphylococcus virus 52a, Staphylococcus virus 80alpha, Staphylococcus virus CNPH82, Staphylococcus virus EW, Staphylococcus virus IPLA5, Staphylococcus virus IPLA7, Staphylococcus virus IPLA88, Staphylococcus virus PH15, Staphylococcus virus phiETA, Staphylococcus virus phiETA2, Staphylococcus virus phiETA3, Staphylococcus virus phiMR11, Staphylococcus virus phiMR25, Staphylococcus virus phiNM1, Staphylococcus virus phiNM2, Staphylococcus virus phiNM4, Staphylococcus virus SAP26, Staphylococcus virus X2, Enterococcus virus FL1, Enterococcus virus FL2, Enterococcus virus FL3, Streptomyces virus Picard, Microbacterium virus Pikmin, Corynebacterium virus Poushou, Providencia virus PR1, Listeria virus LP302, Listeria virus PSA, Psimunavirus psiM2, Propionibacterium virus PFR1, Microbacterium phage KaiHaiDragon, Microbacterium phage Paschalis, Microbacterium phage Quhwah, Streptomyces virus Darolandstone, Streptomyces virus Raleigh, Escherichia virus N15, Rhodococcus virus RER2, Rhizobium virus P106B, Strepomyces virus Drgrey, Strepomyces virus Rima, Microbacterium virus Hendrix, Gordonia virus Fryberger, Gordonia virus Ronaldo, Aeromonas virus pIS4A, Streptomyces virus Rowa, Gordonia virus Ruthy, Streptomyces virus Jay2Jay, Streptomyces virus Mildred21, Streptomyces virus NootNoot, Streptomyces virus Paradiddles, Streptomyces virus Peebs, Streptomyces virus Samisti12, Pseudomonas virus SM1, Corynebacterium virus SamW, Xylella virus Salvo, Xylella virus Sano, Caulobacter virus Sansa, Enterococcus virus BC611, Enterococcus virus IMEEF1, Enterococcus virus SAP6, Enterococcus virus VD13, Streptococcus virus SPQS1, Salmonella virus Sasha, Corynebacterium virus BFK20, Geobacillus virus Tp84, Streptomyces virus Scap1, Gordonia virus Schnabeltier, Microbacterium virus Schubert, Pseudomonas virus 73, Pseudomonas virus Ab26, Pseudomonas virus Kakheti25, Escherichia virus Cajan, Escherichia virus Seurat, Caulobacter virus Seuss, Staphylococcus virus SEP9, Staphylococcus virus Sextaec, Paenibacillus virus Diva, Paenibacillus virus Hb10c2, Paenibacillus virus Rani, Paenibacillus virus Shelly, Paenibacillus virus Sitara, Paenibacillus virus Willow, Lactococcus virus 712, Lactococcus virus ASCC191, Lactococcus virus ASCC273, Lactococcus virus ASCC281, Lactococcus virus ASCC465, Lactococcus virus ASCC532, Lactococcus virus Bibb29, Lactococcus virus bIL170, Lactococcus virus CB13, Lactococcus virus CB14, Lactococcus virus CB19, Lactococcus virus CB20, Lactococcus virus jj50, Lactococcus virus P2, Lactococcus virus P008, Lactococcus virus sk1, Lactococcus virus S14, Bacillus virus Slash, Bacillus virus Stahl, Bacillus virus Staley, Bacillus virus Stills, Gordonia virus Bachita, Gordonia virus ClubL, Gordonia virus Smoothie, Arthobacter virus Sonali, Gordonia virus Soups, Gordonia virus Strosahl, Gordonia virus Wait, Gordonia virus Sour, Bacillus virus SPbeta, Microbacterium virus Hyperion, Microbacterium virus Squash, Burkholderia virus phi6442, Burkholderia virus phi 1026b, Burkholderia virus phiE125, Achromobacter virus 83-24, Achromobacter virus JWX, Arthrobacter virus Tank, Gordonia virus Suzy, Gordonia virus Terapin, Streptomyces virus TG1, Mycobacterium virus Anaya, Mycobacterium virus Angelica, Mycobacterium virus CrimD, Mycobacterium virus Fionnbharth, Mycobacterium virus JAWS, Mycobacterium virus Larva, Mycobacterium virus MacnCheese, Mycobacterium virus Pixie, Mycobacterium virus TM4, Tsukamurella virus TIN2, Tsukamurella virus TIN3, Tsukamurella virus TIN4, Rhodobacter virus RcSpartan, Rhodobacter virus RcTitan, Mycobacterium virus Tortellini, Staphylococcus virus 47, Staphylococcus virus 3a, Staphylococcus virus 42e, Staphylococcus virus IPLA35, Staphylococcus virus phi12, Staphylococcus virus phiSLT, Mycobacterium virus 32HC, Rhodococcus virus Trina, Gordonia virus Trine, Paenibacillus virus Tripp, Flavobacterium virus 1H, Flavobacterium virus 23T, Flavobacterium virus 2A, Flavobacterium virus 6H, Streptomyces virus Lilbooboo, Streptomyces virus Vash, Paenibacillus virus Vegas, Gordonia virus Vendetta, Paracoccus virus Shpa, Pantoea virus Vid5, Acinetobacter virus B1251, Acinetobacter virus R3177, Gordonia virus Brandonk123, Gordonia virus Lennon, Gordonia virus Vivi2, Bordetella virus CN1, Bordetella virus CN2, Bordetella virus FP′, Bordetella virus MW2, Bacillus virus Wbeta, Rhodococcus virus Weasel, Mycobacterium virus Wildcat, Gordonia virus Billnye, Gordonia virus Twister6, Gordonia virus Wizard, Gordonia virus Hotorobo, Gordonia virus Woes, Streptomyces virus TP1604, Streptomyces virus YDN12, Roseobacter virus RDJL1, Roseobacter virus RDJL2, Xanthomonas virus OP1, Xanthomonas virus Xop411, Xanthomonas virus Xp10, Arthobacter virus Yang, Alphaproteobacteria virus phiJ1001, Pseudomonas virus LKO4, Pseudomonas virus M6, Pseudomonas virus MP1412, Pseudomonas virus PAE1, Pseudomonas virus Yua, Gordonia virus Yvonnetastic, Microbacterium virus Zeta1847, Rhodococcus virus RGL3, Paenibacillus virus Lily, Vibrio virus CTXphi, Propionibacterium virus B5, Vibrio virus KSF1, Xanthomonas virus Cflc, Vibrio virus fs1, Vibrio virus VGJ, Ralstonia virus RS551, Ralstonia virus RS603, Ralstonia virus RSM1, Ralstonia virus RSM3, Escherichia virus If1, Escherichia virus M13, Escherichia virus 122, Salmonella virus IKe, Ralstonia virus PE226, Pseudomonas virus Pf1, Stenotrophomonas virus PSH1, Ralstonia virus RSS1, Vibrio virus fs2, Vibrio virus VFJ, Stenotrophomonas virus SMA6, Stenotrophomonas virus SMA9, Stenotrophomonas virus SMA7, Pseudomonas virus Pf3, Thermus virus OH3, Vibrio virus VfO3K6, Vibrio virus VCY, Vibrio virus Vf33, Xanthomonas virus Xf109, Acholeplasma virus L51, Spiroplasma virus SVTS2, Spiroplasma virus C74, Spiroplasma virus R8A2B, Spiroplasma virus SkV1CR23x, Escherichia virus alpha3, Escherichia virus ID21, Escherichia virus ID32, Escherichia virus ID62, Escherichia virus NC28, Escherichia virus NC29, Escherichia virus NC35, Escherichia virus phiK, Escherichia virus St1, Escherichia virus WA45, Escherichia virus G4, Escherichia virus ID52, Escherichia virus Talmos, Escherichia virus phiX174, Bdellovibrio virus MAC1, Bdellovibrio virus MH2K, Chlamydia virus Chp1, Chlamydia virus Chp2, Chlamydia virus CPAR39, Chlamydia virus CPG1, Spiroplasma virus SpV4, Bombyx mori bidensovirus, Acerodon celebensis polyomavirus 1, Artibeus planirostris polyomavirus 2, Artibeus planirostris polyomavirus 3, Ateles paniscus polyomavirus 1, Cardioderma cor polyomavirus 1, Carollia perspicillata polyomavirus 1, Chlorocebus pygerythrus polyomavirus 1, Chlorocebus pygerythrus polyomavirus 3, Dobsonia moluccensis polyomavirus 1, Eidolon helvum polyomavirus 1, Gorilla gorilla polyomavirus 1, Human polyomavirus 5, Human polyomavirus 8, Human polyomavirus 9, Human polyomavirus 13, Human polyomavirus 14, Macaca fascicularis polyomavirus 1, Mesocricetus auratus polyomavirus 1, Miniopterus schreibersii polyomavirus 1, Miniopterus schreibersii polyomavirus 2, Molossus molossus polyomavirus 1, Mus musculus polyomavirus 1, Otomops martiensseni polyomavirus 1, Otomops martiensseni polyomavirus 2, Pan troglodytes polyomavirus 1, Pan troglodytes polyomavirus 2, Pan troglodytes polyomavirus 3, Pan troglodytes polyomavirus 4, Pan troglodytes polyomavirus 5, Pan troglodytes polyomavirus 6, Pan troglodytes polyomavirus 7, Papio cynocephalus polyomavirus 1, Piliocolobus badius polyomavirus 1, Piliocolobus rufomitratus polyomavirus 1, Pongo abelii polyomavirus 1, Pongo pygmaeus polyomavirus 1, Procyon lotor polyomavirus 1, Pteropus vampyrus polyomavirus 1, Rattus norvegicus polyomavirus 1, Sorex araneus polyomavirus 1, Sorex coronatus polyomavirus 1, Sorex minutus polyomavirus 1, Sturnira lilium polyomavirus 1, Tupaia belangeri polyomavirus 1, Acerodon celebensis polyomavirus 2, Artibeus planirostris polyomavirus 1, Canis familiaris polyomavirus 1, Cebus albifrons polyomavirus 1, Cercopithecus erythrotis polyomavirus 1, Chlorocebus pygerythrus polyomavirus 2, Desmodus rotundus polyomavirus 1, Dobsonia moluccensis polyomavirus 2, Dobsonia moluccensis polyomavirus 3, Enhydra lutris polyomavirus 1, Equus caballus polyomavirus 1, Human polyomavirus 1, Human polyomavirus 2, Human polyomavirus 3, Human polyomavirus 4, Leptonychotes weddellii polyomavirus 1, Loxodonta africana polyomavirus 1, Macaca mulatta polyomavirus 1, Mastomys natalensis polyomavirus 1, Meles meles polyomavirus 1, Microtus arvalis polyomavirus 1, Miniopterus africanus polyomavirus 1, Mus musculus polyomavirus 2, Mus musculus polyomavirus 3, Myodes glareolus polyomavirus 1, Myotis lucifugus polyomavirus 1, Pan troglodytes polyomavirus 8, Papio cynocephalus polyomavirus 2, Pteronotus davyi polyomavirus 1, Pteronotus parnellii polyomavirus 1, Rattus norvegicus polyomavirus 2, Rousettus aegyptiacus polyomavirus 1, Saimiri boliviensis polyomavirus 1, Saimiri sciureus polyomavirus 1, Vicugna pacos polyomavirus 1, Zalophus californianus polyomavirus 1, Human polyomavirus 6, Human polyomavirus 7, Human polyomavirus 10, Human polyomavirus 11, Anser anser polyomavirus 1, Ayes polyomavirus 1, Corvus monedula polyomavirus 1, Cracticus torquatus polyomavirus 1, Erythrura gouldiae polyomavirus 1, Lonchura maja polyomavirus 1, Pygoscelis adeliae polyomavirus 1, Pyrrhula pyrrhula polyomavirus 1, Serinus canaria polyomavirus 1, Ailuropoda melanoleuca polyomavirus 1, Bos taurus polyomavirus 1, Centropristis striata polyomavirus 1, Delphinus delphis polyomavirus 1, Procyon lotor polyomavirus 2, Rhynchobatus djiddensis polyomavirus 1, Sparus aurata polyomavirus 1, Trematomus bernacchii polyomavirus 1, Trematomus pennellii polyomavirus 1, Alphapapillomavirus 1, Alphapapillomavirus 2, Alphapapillomavirus 3, Alphapapillomavirus 4, Alphapapillomavirus 5, Alphapapillomavirus 6, Alphapapillomavirus 7, Alphapapillomavirus 8, Alphapapillomavirus 9, Alphapapillomavirus 10, Alphapapillomavirus 11, Alphapapillomavirus 12, Alphapapillomavirus 13, Alphapapillomavirus 14, Betapapillomavirus 1, Betapapillomavirus 2, Betapapillomavirus 3, Betapapillomavirus 4, Betapapillomavirus 5, Betapapillomavirus 6, Chipapillomavirus 1, Chipapillomavirus 2, Chipapillomavirus 3, Deltapapillomavirus 1, Deltapapillomavirus 2, Deltapapillomavirus 3, Deltapapillomavirus 4, Deltapapillomavirus 5, Deltapapillomavirus 6, Deltapapillomavirus 7, Dyochipapillomavirus 1, Dyodeltapapillomavirus 1, Dyoepsilonpapillomavirus 1, Dyoetapapillomavirus 1, Dyoiotapapillomavirus 1, Dyoiotapapillomavirus 2, Dyokappapapillomavirus 1, Dyokappapapillomavirus 2, Dyokappapapillomavirus 3, Dyokappapapillomavirus 4, Dyokappapapillomavirus 5, Dyolambdapapillomavirus 1, Dyomupapillomavirus 1, Dyonupapillomavirus 1, Dyoomegapapillomavirus 1, Dyoomikronpapillomavirus 1, Dyophipapillomavirus 1, Dyopipapillomavirus 1, Dyopsipapillomavirus 1, Dyorhopapillomavirus 1, Dyosigmapapillomavirus 1, Dyotaupapillomavirus 1, Dyothetapapillomavirus 1, Dyoupsilonpapillomavirus 1, Dyoxipapillomavirus 1, Dyoxipapillomavirus 2, Dyozetapapillomavirus 1, Epsilonpapillomavirus 1, Epsilonpapillomavirus 2, Etapapillomavirus 1, Gammapapillomavirus 1, Gammapapillomavirus 2, Gammapapillomavirus 3, Gammapapillomavirus 4, Gammapapillomavirus 5, Gammapapillomavirus 6, Gammapapillomavirus 7, Gammapapillomavirus 8, Gammapapillomavirus 9, Gammapapillomavirus 10, Gammapapillomavirus 11, Gammapapillomavirus 12, Gammapapillomavirus 13, Gammapapillomavirus 14, Gammapapillomavirus 15, Gammapapillomavirus 16, Gammapapillomavirus 17, Gammapapillomavirus 18, Gammapapillomavirus 19, Gammapapillomavirus 20, Gammapapillomavirus 21, Gammapapillomavirus 22, Gammapapillomavirus 23, Gammapapillomavirus 24, Gammapapillomavirus 25, Gammapapillomavirus 26, Gammapapillomavirus 27, Iotapapillomavirus 1, Iotapapillomavirus 2, Kappapapillomavirus 1, Kappapapillomavirus 2, Lambdapapillomavirus 1, Lambdapapillomavirus 2, Lambdapapillomavirus 3, Lambdapapillomavirus 4, Lambdapapillomavirus 5, Mupapillomavirus 1, Mupapillomavirus 2, Mupapillomavirus 3, Nupapillomavirus 1, Omegapapillomavirus 1, Omikronpapillomavirus 1, Phipapillomavirus 1, Pipapillomavirus 1, Pipapillomavirus 2, Psipapillomavirus 1, Psipapillomavirus 2, Psipapillomavirus 3, Rhopapillomavirus 1, Rhopapillomavirus 2, Sigmapapillomavirus 1, Taupapillomavirus 1, Taupapillomavirus 2, Taupapillomavirus 3, Taupapillomavirus 4, Thetapapillomavirus 1, Treisdeltapapillomavirus 1, Treisepsilonpapillomavirus 1, Treisetapapillomavirus 1, Treisiotapapillomavirus 1, Treiskappapapillomavirus 1, Treisthetapapillomavirus 1, Treiszetapapillomavirus 1, Upsilonpapillomavirus 1, Upsilonpapillomavirus 2, Upsilonpapillomavirus 3, Xipapillomavirus 1, Xipapillomavirus 2, Xipapillomavirus 3, Xipapillomavirus 4, Xipapillomavirus 5, Zetapapillomavirus 1, Alefpapillomavirus 1, Asteroid aquambidensovirus 1, Decapod aquambidensovirus 1, Blattodean blattambidensovirus 1, Hemipteran hemiambidensovirus 1, Hemipteran hemiambidensovirus 2, Lepidopteran iteradensovirus 1, Lepidopteran iteradensovirus 2, Lepidopteran iteradensovirus 3, Lepidopteran iteradensovirus 4, Lepidopteran iteradensovirus 5, Orthopteran miniambidensovirus 1, Blattodean pefuambidensovirus 1, Dipteran protoambidensovirus 1, Lepidopteran protoambidensovirus 1, Hemipteran scindoambidensovirus 1, Hymenopteran scindoambidensovirus 1, Orthopteran scindoambidensovirus 1, Dipteran brevihamaparvovirus 1, Dipteran brevihamaparvovirus 2, Carnivore chaphamaparvovirus 1, Chiropteran chaphamaparvovirus 1, Galliform chaphamaparvovirus 1, Galliform chaphamaparvovirus 2, Galliform chaphamaparvovirus 3, Rodent chaphamaparvovirus 1, Rodent chaphamaparvovirus 2, Ungulate chaphamaparvovirus 1, Decapod hepanhamaparvovirus 1, Syngnathid ichthamaparvovirus 1, Decapod penstylhamaparvovirus 1, Carnivore amdoparvovirus 1, Carnivore amdoparvovirus 2, Carnivore amdoparvovirus 3, Carnivore amdoparvovirus 4, Carnivore amdoparvovirus 5, Chiropteran artiparvovirus 1, Galliform aveparvovirus 1, Gruiform aveparvovirus 1, Carnivore bocaparvovirus 1, Carnivore bocaparvovirus 2, Carnivore bocaparvovirus 3, Carnivore bocaparvovirus 4, Carnivore bocaparvovirus 5, Carnivore bocaparvovirus 6, Chiropteran bocaparvovirus 1, Chiropteran bocaparvovirus 2, Chiropteran bocaparvovirus 3, Chiropteran bocaparvovirus 4, Lagomorph bocaparvovirus 1, Pinniped bocaparvovirus 1, Pinniped bocaparvovirus 2, Primate bocaparvovirus 1, Primate bocaparvovirus 2, Rodent bocaparvovirus 1, Rodent bocaparvovirus 2, Ungulate bocaparvovirus 1, Ungulate bocaparvovirus 2, Ungulate bocaparvovirus 3, Ungulate bocaparvovirus 4, Ungulate bocaparvovirus 5, Ungulate bocaparvovirus 6, Ungulate bocaparvovirus 7, Ungulate bocaparvovirus 8, Pinniped copiparvovirus 1, Ungulate copiparvovirus 1, Ungulate copiparvovirus 2, Ungulate copiparvovirus 3, Ungulate copiparvovirus 4, Ungulate copiparvovirus 5, Ungulate copiparvovirus 6, Adeno-associated dependoparvovirus A, Adeno-associated dependoparvovirus B, Anseriform dependoparvovirus 1, Avian dependoparvovirus 1, Chiropteran dependoparvovirus 1, Pinniped dependoparvovirus 1, Rodent dependoparvovirus 1, Rodent dependoparvovirus 2, Squamate dependoparvovirus 1, Squamate dependoparvovirus 2, Pinniped erythroparvovirus 1, Primate erythroparvovirus 1, Primate erythroparvovirus 2, Primate erythroparvovirus 3, Primate erythroparvovirus 4, Rodent erythroparvovirus 1, Ungulate erythroparvovirus 1, Primate loriparvovirus 1, Carnivore protoparvovirus, Carnivore protoparvovirus 1, Chiropteran protoparvovirus 1, Eulipotyphla protoparvovirus 1, Primate protoparvovirus 1, Primate protoparvovirus 2, Primate protoparvovirus 3, Primate protoparvovirus 4, Rodent protoparvovirus 1, Rodent protoparvovirus 2, Rodent protoparvovirus 3, Ungulate protoparvovirus 1, Ungulate protoparvovirus 2, Chiropteran tetraparvovirus 1, Primate tetraparvovirus 1, Ungulate tetraparvovirus 1, Ungulate tetraparvovirus 2, Ungulate tetraparvovirus 3, Ungulate tetraparvovirus 4, Chaetoceros diatodnavirus 1, Avon-Heathcote Estuary associated kieseladnavirus, Chaetoceros protobacilladnavirus 1, Chaetoceros protobacilladnavirus 2, Chaetoceros protobacilladnavirus 3, Chaetoceros protobacilladnavirus 4, Marine protobacilladnavirus 1, Snail associated protobacilladnavirus 1, Snail associated protobacilladnavirus 2, Barbel circovirus, Bat associated circovirus 1, Bat associated circovirus 2, Bat associated circovirus 3, Bat associated circovirus 4, Bat associated circovirus 5, Bat associated circovirus 6, Bat associated circovirus 7, Bat associated circovirus 8, Bat associated circovirus 9, Bat associated circovirus 10, Bat associated circovirus 11, Bat associated circovirus 12, Beak and feather disease virus, Canary circovirus, Canine circovirus, Chimpanzee associated circovirus 1, Civet circovirus, Duck circovirus, European catfish circovirus, Finch circovirus, Goose circovirus, Gull circovirus, Human associated circovirus 1, Mink circovirus, Mosquito associated circovirus 1, Pigeon circovirus, Porcine circovirus 1, Porcine circovirus 2, Porcine circovirus 3, Raven circovirus, Rodent associated circovirus 1, Rodent associated circovirus 2, Rodent associated circovirus 3, Rodent associated circovirus 4, Rodent associated circovirus 5, Rodent associated circovirus 6, Rodent associated circovirus 7, Starling circovirus, Swan circovirus, Tick associated circovirus 1, Tick associated circovirus 2, Zebra finch circovirus, Ant associated cyclovirus 1, Bat associated cyclovirus 1, Bat associated cyclovirus 2, Bat associated cyclovirus 3, Bat associated cyclovirus 4, Bat associated cyclovirus 5, Bat associated cyclovirus 6, Bat associated cyclovirus 7, Bat associated cyclovirus 8, Bat associated cyclovirus 9, Bat associated cyclovirus 10, Bat associated cyclovirus 11, Bat associated cyclovirus 12, Bat associated cyclovirus 13, Bat associated cyclovirus 14, Bat associated cyclovirus 15, Bat associated cyclovirus 16, Bovine associated cyclovirus 1, Chicken associated cyclovirus 1, Chicken associated cyclovirus 2, Chimpanzee associated cyclovirus 1, Cockroach associated cyclovirus 1, Dragonfly associated cyclovirus 1, Dragonfly associated cyclovirus 2, Dragonfly associated cyclovirus 3, Dragonfly associated cyclovirus 4, Dragonfly associated cyclovirus 5, Dragonfly associated cyclovirus 6, Dragonfly associated cyclovirus 7, Dragonfly associated cyclovirus 8, Duck associated cyclovirus 1, Feline associated cyclovirus 1, Goat associated cyclovirus 1, Horse associated cyclovirus 1, Human associated cyclovirus 1, Human associated cyclovirus 2, Human associated cyclovirus 3, Human associated cyclovirus 4, Human associated cyclovirus 5, Human associated cyclovirus 6, Human associated cyclovirus 7, Human associated cyclovirus 8, Human associated cyclovirus 9, Human associated cyclovirus 10, Human associated cyclovirus 11, Human associated cyclovirus 12, Mouse associated cyclovirus 1, Rodent associated cyclovirus 1, Rodent associated cyclovirus 2, Spider associated cyclovirus 1, Squirrel associated cyclovirus 1, Bovine associated bovismacovirus 1, Bovine associated bovismacovirus 2, Dragonfly associated bovismacovirus 1, Bovine associated cosmacovirus 1, Dragonfly associated dragsmacovirus 1, Bovine associated drosmacovirus 1, Camel associated drosmacovirus 1, Camel associated drosmacovirus2, Bovine associated huchismacovirus 1, Bovine associated huchismacovirus 2, Chicken associated huchismacovirus 1, Chicken associated huchismacovirus 2, Human associated huchismacovirus 1, Human associated huchismacovirus 2, Human associated huchismacovirus 3, Bovine associated porprismacovirus 1, Camel associated porprismacovirus 1, Camel associated porprismacovirus 2, Camel associated porprismacovirus 3, Camel associated porprismacovirus 4, Chimpanzee associated porprismacovirus 1, Chimpanzee associated porprismacovirus 2, Gorilla associated porprismacovirus 1, Howler monkey associated porprismacovirus 1, Human associated porprismacovirus 1, Human associated porprismacovirus 2, Lemur associated porprismacovirus 1, Porcine associated porprismacovirus 1, Porcine associated porprismacovirus 2, Porcine associated porprismacovirus 3, Porcine associated porprismacovirus 4, Porcine associated porprismacovirus 5, Porcine associated porprismacovirus 6, Porcine associated porprismacovirus 7, Porcine associated porprismacovirus 8, Porcine associated porprismacovirus 9, Porcine associated porprismacovirus 10, Rat associated porprismacovirus 1, Sheep associated porprismacovirus 1, Sheep associated porprismacovirus 2, Sheep associated porprismacovirus 3, Turkey associated porprismacovirus 1, Abaca bunchy top virus, Banana bunchy top virus, Cardamom bushy dwarf virus, Black medic leaf roll virus, Faba bean necrotic stunt virus, Faba bean necrotic yellows virus, Faba bean yellow leaf virus, Milk vetch dwarf virus, Pea necrotic yellow dwarf virus, Pea yellow stunt virus, Subterranean clover stunt virus, Coconut foliar decay virus, Brisavirus, Vientovirus, Beet curly top Iran virus, Exomis microphylla latent virus, Spinach curly top Arizona virus, Abutilon golden mosaic virus, Abutilon mosaic Bolivia virus, Abutilon mosaic Brazil virus, Abutilon mosaic virus, African cassava mosaic Burkina Faso virus, African cassava mosaic virus, Ageratum enation virus, Ageratum leaf curl Sichuan virus, Ageratum leaf curl virus, Ageratum yellow vein Hualian virus, Ageratum yellow vein Sri Lanka virus, Ageratum yellow vein virus, Allamanda leaf curl virus, Allamanda leaf mottle distortion virus, Alternanthera yellow vein virus, Andrographis yellow vein leaf curl virus, Asystasia mosaic Madagascar virus, Bean calico mosaic virus, Bean chlorosis virus, Bean dwarf mosaic virus, Bean golden mosaic virus, Bean golden yellow mosaic virus, Bean leaf crumple virus, Bean white chlorosis mosaic virus, Bean yellow mosaic Mexico virus, Bhendi yellow vein Bhubhaneswar virus, Bhendi yellow vein Haryana virus, Bhendi yellow vein mosaic Delhi virus, Bhendi yellow vein mosaic virus, Bitter gourd yellow mosaic virus, Blainvillea yellow spot virus, Blechum interveinal chlorosis virus, Blechum yellow vein virus, Boerhavia yellow spot virus, Cabbage leaf curl Jamaica virus, Cabbage leaf curl virus, Capraria yellow spot virus, Cassava mosaic Madagascar virus, Catharanthus yellow mosaic virus, Centrosema yellow spot virus, Chayote yellow mosaic virus, Chenopodium leaf curl virus, Chilli leaf curl Ahmedabad virus, Chilli leaf curl Bhavanisagar virus, Chilli leaf curl Gonda virus, Chilli leaf curl India virus, Chilli leaf curl Kanpur virus, Chilli leaf curl Sri Lanka virus, Chilli leaf curl Vellanad virus, Chilli leaf curl virus, Chino del tomate Amazonas virus, Chino del tomate virus, Cleome golden mosaic virus, Cleome leaf crumple virus, Clerodendron golden mosaic virus, Clerodendron yellow mosaic virus, Clerodendrum golden mosaic China virus, Clerodendrum golden mosaic Jiangsu virus, Cnidoscolus mosaic leaf deformation virus, Coccinia mosaic Tamil Nadu virus, Common bean mottle virus, Common bean severe mosaic virus, Corchorus golden mosaic virus, Corchorus yellow spot virus, Corchorus yellow vein mosaic virus, Corchorus yellow vein virus, Cotton chlorotic spot virus, Cotton leaf crumple virus, Cotton leaf curl Alabad virus, Cotton leaf curl Bangalore virus, Cotton leaf curl Barasat virus, Cotton leaf curl Gezira virus, Cotton leaf curl Kokhran virus, Cotton leaf curl Multan virus, Cotton yellow mosaic virus, Cowpea bright yellow mosaic virus, Cowpea golden mosaic virus, Crassocephalum yellow vein virus, Croton golden mosaic virus, Croton yellow vein mosaic virus, Cucurbit leaf crumple virus, Dalechampia chlorotic mosaic virus, Datura leaf curl virus, Datura leaf distortion virus, Deinbollia mosaic virus, Desmodium leaf distortion virus, Desmodium mottle virus, Dicliptera yellow mottle Cuba virus, Dicliptera yellow mottle virus, Dolichos yellow mosaic virus, Duranta leaf curl virus, East African cassava mosaic Cameroon virus, East African cassava mosaic Kenya virus, East African cassava mosaic Malawi virus, East African cassava mosaic virus, East African cassava mosaic Zanzibar virus, Eclipta yellow vein virus, Emilia yellow vein Fujian virus, Emilia yellow vein Thailand virus, Emilia yellow vein virus, Erectites yellow mosaic virus, Eupatorium yellow vein mosaic virus, Eupatorium yellow vein virus, Euphorbia leaf curl Guangxi virus, Euphorbia leaf curl virus, Euphorbia mosaic Peru virus, Euphorbia mosaic virus, Euphorbia yellow leaf curl virus, Euphorbia yellow mosaic virus, French bean leaf curl virus, Hedyotis uncinella yellow mosaic virus, Hemidesmus yellow mosaic virus, Hibiscus golden mosaic virus, Hollyhock leaf curl virus, Hollyhock yellow vein mosaic virus, Hollyhock yellow vein virus, Honeysuckle yellow vein virus, Horsegram yellow mosaic virus, Indian cassava mosaic virus, Jacquemontia mosaic Yucatan virus, Jacquemontia yellow mosaic virus, Jacquemontia yellow vein virus, Jatropha leaf curl Gujarat virus, Jatropha leaf curl virus, Jatropha leaf yellow mosaic virus, Jatropha mosaic India virus, Jatropha mosaic Nigeria virus, Jatropha mosaic virus, Jatropha yellow mosaic virus, Kudzu mosaic virus, Leonurus mosaic virus, Lindernia anagallis yellow vein virus, Lisianthus enation leaf curl virus, Ludwigia yellow vein Vietnam virus, Ludwigia yellow vein virus, Luffa yellow mosaic virus, Lycianthes yellow mosaic virus, Macroptilium bright mosaic virus, Macroptilium common mosaic virus, Macroptilium golden mosaic virus, Macroptilium mosaic Puerto Rico virus, Macroptilium yellow mosaic Florida virus, Macroptilium yellow mosaic virus, Macroptilium yellow spot virus, Macroptilium yellow vein virus, Malvastrum bright yellow mosaic virus, Malvastrum leaf curl Philippines virus, Malvastrum leaf curl virus, Malvastrum yellow mosaic Helshire virus, Malvastrum yellow mosaic Jamaica virus, Malvastrum yellow mosaic virus, Malvastrum yellow vein Cambodia virus, Malvastrum yellow vein Honghe virus, Malvastrum yellow vein Lahore virus, Malvastrum yellow vein virus, Malvastrum yellow vein Yunnan virus, Melochia mosaic virus, Melochia yellow mosaic virus, Melon chlorotic leaf curl virus, Melon chlorotic mosaic virus, Melon yellow mosaic virus, Merremia mosaic Puerto Rico virus, Merremia mosaic virus, Mesta yellow vein mosaic Bahraich virus, Mimosa yellow leaf curl virus, Mirabilis leaf curl virus, Mungbean yellow mosaic India virus, Mungbean yellow mosaic virus, Okra enation leaf curl virus, Okra leaf curl Oman virus, Okra mottle virus, Okra yellow crinkle virus, Okra yellow mosaic Mexico virus, Oxalis yellow vein virus, Papaya leaf crumple virus, Papaya leaf curl China virus, Papaya leaf curl Guandong virus, Papaya leaf curl virus, Passionfruit leaf curl virus, Passionfruit leaf distortion virus, Passionfruit severe leaf distortion virus, Pavonia mosaic virus, Pavonia yellow mosaic virus, Pea leaf distortion virus, Pedilanthus leaf curl virus, Pepper golden mosaic virus, Pepper huasteco yellow vein virus, Pepper leaf curl Bangladesh virus, Pepper leaf curl Lahore virus, Pepper leaf curl virus, Pepper leaf curl Yunnan virus, Pepper leafroll virus, Pepper yellow leaf curl Aceh virus, Pepper yellow leaf curl Indonesia virus, Pepper yellow leaf curl Indonesia virus 2, Pepper yellow leaf curl Thailand virus, Pepper yellow leaf curl virus, Pepper yellow vein Mali virus, Potato yellow mosaic Panama virus, Potato yellow mosaic virus, Pouzolzia golden mosaic virus, Pouzolzia mosaic Guangdong virus, Pouzolzia yellow mosaic virus, Premna leaf curl virus, Pumpkin yellow mosaic virus, Radish leaf curl virus, Ramie mosaic Yunnan virus, Rhynchosia golden mosaic Havana virus, Rhynchosia golden mosaic Sinaloa virus, Rhynchosia golden mosaic virus, Rhynchosia mild mosaic virus, Rhynchosia rugose golden mosaic virus, Rhynchosia yellow mosaic India virus, Rhynchosia yellow mosaic virus, Rose leaf curl virus, Sauropus leaf curl virus, Senecio yellow mosaic virus, Senna leaf curl virus, Sida angular mosaic virus, Sida bright yellow mosaic virus, Sida chlorotic mottle virus, Sida chlorotic vein virus, Sida ciliaris golden mosaic virus, Sida common mosaic virus, Sida golden mosaic Braco virus, Sida golden mosaic Brazil virus, Sida golden mosaic Buckup virus, Sida golden mosaic Costa Rica virus, Sida golden mosaic Florida virus, Sida golden mosaic Lara virus, Sida golden mosaic virus, Sida golden mottle virus, Sida golden yellow spot virus, Sida golden yellow vein virus, Sida leaf curl virus, Sida micrantha mosaic virus, Sida mosaic Alagoas virus, Sida mosaic Bolivia virus 1, Sida mosaic Bolivia virus 2, Sida mosaic Sinaloa virus, Sida mottle Alagoas virus, Sida mottle virus, Sida yellow blotch virus, Sida yellow leaf curl virus, Sida yellow mosaic Alagoas virus, Sida yellow mosaic China virus, Sida yellow mosaic virus, Sida yellow mosaic Yucatan virus, Sida yellow mottle virus, Sida yellow net virus, Sida yellow vein Vietnam virus, Sida yellow vein virus, Sidastrum golden leaf spot virus, Siegesbeckia yellow vein Guangxi virus, Siegesbeckia yellow vein virus, Solanum mosaic Bolivia virus, South African cassava mosaic virus, Soybean blistering mosaic virus, Soybean chlorotic blotch virus, Soybean mild mottle virus, Spilanthes yellow vein virus, Spinach yellow vein virus, Squash leaf curl China virus, Squash leaf curl Philippines virus, Squash leaf curl virus, Squash leaf curl Yunnan virus, Squash mild leaf curl virus, Sri Lankan cassava mosaic virus, Stachytarpheta leaf curl virus, Sunn hemp leaf distortion virus, Sweet potato golden vein Korea virus, Sweet potato leaf curl Canary virus, Sweet potato leaf curl China virus, Sweet potato leaf curl Georgia virus, Sweet potato leaf curl Guangxi virus, Sweet potato leaf curl Henan virus, Sweet potato leaf curl Hubei virus, Sweet potato leaf curl Sao Paulo virus, Sweet potato leaf curl Shandong virus, Sweet potato leaf curl Sichuan virus 1, Sweet potato leaf curl Sichuan virus 2, Sweet potato leaf curl South Carolina virus, Sweet potato leaf curl virus, Sweet potato mosaic virus, Synedrella yellow vein clearing virus, Telfairia golden mosaic virus, Tobacco curly shoot virus, Tobacco leaf curl Comoros virus, Tobacco leaf curl Cuba virus, Tobacco leaf curl Dominican Republic virus, Tobacco leaf curl Pusa virus, Tobacco leaf curl Thailand virus, Tobacco leaf curl Yunnan virus, Tobacco leaf curl Zimbabwe virus, Tobacco leaf rugose virus, Tobacco mottle leaf curl virus, Tobacco yellow crinkle virus, Tomato bright yellow mosaic virus, Tomato bright yellow mottle virus, Tomato chino La Paz virus, Tomato chlorotic leaf curl virus, Tomato chlorotic leaf distortion virus, Tomato chlorotic mottle Guyane virus, Tomato chlorotic mottle virus, Tomato common mosaic virus, Tomato curly stunt virus, Tomato dwarf leaf virus, Tomato enation leaf curl virus, Tomato golden leaf distortion virus, Tomato golden leaf spot virus, Tomato golden mosaic virus, Tomato golden mottle virus, Tomato golden vein virus, Tomato interveinal chlorosis virus, Tomato latent virus, Tomato leaf curl Anjouan virus, Tomato leaf curl Arusha virus, Tomato leaf curl Bangalore virus, Tomato leaf curl Bangladesh virus, Tomato leaf curl Burkina Faso virus, Tomato leaf curl Cebu virus, Tomato leaf curl China virus, Tomato leaf curl Comoros virus, Tomato leaf curl Diana virus, Tomato leaf curl Ghana virus, Tomato leaf curl Guangdong virus, Tomato leaf curl Guangxi virus, Tomato leaf curl Gujarat virus, Tomato leaf curl Hainan virus, Tomato leaf curl Hanoi virus, Tomato leaf curl Hsinchu virus, Tomato leaf curl Iran virus, Tomato leaf curl Japan virus, Tomato leaf curl Java virus, Tomato leaf curl Joydebpur virus, Tomato leaf curl Karnataka virus, Tomato leaf curl Karnataka virus 2, Tomato leaf curl Karnataka virus 3, Tomato leaf curl Kerala virus, Tomato leaf curl Laos virus, Tomato leaf curl Liwa virus, Tomato leaf curl Madagascar virus, Tomato leaf curl Mahe virus, Tomato leaf curl Malaysia virus, Tomato leaf curl Mali virus, Tomato leaf curl Mindanao virus, Tomato leaf curl Moheli virus, Tomato leaf curl Namakely virus, Tomato leaf curl New Delhi virus, Tomato leaf curl New Delhi virus 2, Tomato leaf curl New Delhi virus 4, Tomato leaf curl New Delhi virus 5, Tomato leaf curl Nigeria virus, Tomato leaf curl Palampur virus, Tomato leaf curl Patna virus, Tomato leaf curl Philippines virus, Tomato leaf curl Pune virus, Tomato leaf curl purple vein virus, Tomato leaf curl Rajasthan virus, Tomato leaf curl Seychelles virus, Tomato leaf curl Sinaloa virus, Tomato leaf curl Sri Lanka virus, Tomato leaf curl Sudan virus, Tomato leaf curl Sulawesi virus, Tomato leaf curl Taiwan virus, Tomato leaf curl Tanzania virus, Tomato leaf curl Toliara virus, Tomato leaf curl Uganda virus, Tomato leaf curl Vietnam virus, Tomato leaf curl virus, Tomato leaf deformation virus, Tomato leaf distortion virus, Tomato mild mosaic virus, Tomato mild yellow leaf curl Aragua virus, Tomato mosaic Havana virus, Tomato mottle leaf curl virus, Tomato mottle Taino virus, Tomato mottle virus, Tomato mottle wrinkle virus, Tomato rugose mosaic virus, Tomato rugose yellow leaf curl virus, Tomato severe leaf curl Kalakada virus, Tomato severe leaf curl virus, Tomato severe rugose virus, Tomato twisted leaf virus, Tomato wrinkled mosaic virus, Tomato yellow leaf curl Axarquia virus, Tomato yellow leaf curl China virus, Tomato yellow leaf curl Guangdong virus, Tomato yellow leaf curl Indonesia virus, Tomato yellow leaf curl Kanchanaburi virus, Tomato yellow leaf curl Malaga virus, Tomato yellow leaf curl Mali virus, Tomato yellow leaf curl Sardinia virus, Tomato yellow leaf curl Shuangbai virus, Tomato yellow leaf curl Thailand virus, Tomato yellow leaf curl Vietnam virus, Tomato yellow leaf curl virus, Tomato yellow leaf curl Yunnan virus, Tomato yellow leaf distortion virus, Tomato yellow margin leaf curl virus, Tomato yellow mottle virus, Tomato yellow spot virus, Tomato yellow vein streak virus, Triumfetta yellow mosaic virus, Velvet bean golden mosaic virus, Velvet bean severe mosaic virus, Vernonia crinkle virus, Vernonia yellow vein Fujian virus, Vernonia yellow vein virus, Vigna yellow mosaic virus, Vinca leaf curl virus, Watermelon chlorotic stunt virus, West African Asystasia virus 1, West African Asystasia virus 2, West African Asystasia virus 3, Whitefly-associated begomovirus 1, Whitefly-associated begomovirus 2, Whitefly-associated begomovirus 3, Whitefly-associated begomovirus 4, Whitefly-associated begomovirus 6, Whitefly-associated begomovirus 7, Wissadula golden mosaic virus, Wissadula yellow mosaic virus, Alfalfa leaf curl virus, Euphorbia caput-medusae latent virus, French bean severe leaf curl virus, Plantago lanceolata latent virus, Beet curly top virus, Horseradish curly top virus, Spinach severe curly top virus, Eragrostis curvula streak virus, Grapevine red blotch virus, Prunus latent virus, Wild Vitis latent virus, Axonopus compressus streak virus, Bromus catharticus striate mosaic virus, Chickpea chlorosis Australia virus, Chickpea chlorosis virus, Chickpea chlorotic dwarf virus, Chickpea redleaf virus, Chickpea yellow dwarf virus, Chickpea yellows virus, Chloris striate mosaic virus, Digitaria ciliaris striate mosaic virus, Digitaria didactyla striate mosaic virus, Digitaria streak virus, Dragonfly-associated mastrevirus, Eragrostis minor streak virus, Eragrostis streak virus, Maize streak dwarfing virus, Maize streak Reunion virus, Maize streak virus, Maize striate mosaic virus, Miscanthus streak virus, Oat dwarf virus, Panicum streak virus, Paspalum dilatatum striate mosaic virus, Paspalum striate mosaic virus, Rice latent virus 1, Rice latent virus 2, Saccharum streak virus, Sporobolus striate mosaic virus 1, Sporobolus striate mosaic virus 2, Sugarcane chlorotic streak virus, Sugarcane streak Egypt virus, Sugarcane streak Reunion virus, Sugarcane streak virus, Sugarcane striate virus, Sugarcane white streak virus, Sweet potato symptomless virus 1, Switchgrass mosaic-associated virus, Tobacco yellow dwarf virus, Urochloa streak virus, Wheat dwarf India virus, Wheat dwarf virus, Tomato pseudo-curly top virus, Sesame curly top virus, Turnip curly top virus, Turnip leaf roll virus, Citrus chlorotic dwarf associated virus, Mulberry mosaic dwarf associated virus, Blackbird associated gemycircularvirus 1, Bovine associated gemycircularvirus 1, Bromus associated gemycircularvirus 1, Cassava associated gemycircularvirus 1, Chickadee associated gemycircularvirus 1, Chicken associated gemycircularvirus 1, Chicken associated gemycircularvirus 2, Dragonfly associated gemycircularvirus 1, Equine associated gemycircularvirus 1, Fur seal associated gemycircularvirus 1, Gerygone associated gemycircularvirus 1, Gerygone associated gemycircularvirus 2, Gerygone associated gemycircularvirus 3, Hypericum associated gemycircularvirus 1, Lama associated gemycircularvirus 1, Mallard associated gemycircularvirus 1, Miniopterus associated gemycircularvirus 1, Mongoose associated gemycircularvirus 1, Mosquito associated gemycircularvirus 1, Odonata associated gemycircularvirus 1, Odonata associated gemycircularvirus 2, Poaceae associated gemycircularvirus 1, Porcine associated gemycircularvirus 1, Porcine associated gemycircularvirus 2, Pteropus associated gemycircularvirus 1, Pteropus associated gemycircularvirus 2, Pteropus associated gemycircularvirus 3, Pteropus associated gemycircularvirus 4, Pteropus associated gemycircularvirus 5, Pteropus associated gemycircularvirus 6, Pteropus associated gemycircularvirus 7, Pteropus associated gemycircularvirus 8, Pteropus associated gemycircularvirus 9, Pteropus associated gemycircularvirus 10, Rat associated gemycircularvirus 1, Sclerotinia gemycircularvirus 1, Sewage derived gemycircularvirus 1, Sewage derived gemycircularvirus 2, Sewage derived gemycircularvirus 3, Sewage derived gemycircularvirus 4, Sewage derived gemycircularvirus 5, Sheep associated gemycircularvirus 1, Soybean associated gemycircularvirus 1, Dragonfly associated gemyduguivirus 1, Canine associated gemygorvirus 1, Mallard associated gemygorvirus 1, Pteropus associated gemygorvirus 1, Sewage derived gemygorvirus 1, Starling associated gemygorvirus 1, Badger associated gemykibivirus 1, Black robin associated gemykibivirus 1, Blackbird associated gemykibivirus 1, Bovine associated gemykibivirus 1, Dragonfly associated gemykibivirus 1, Human associated gemykibivirus 1, Human associated gemykibivirus 2, Human associated gemykibivirus 3, Human associated gemykibivirus 4, Human associated gemykibivirus 5, Mongoose associated gemykibivirus 1, Pteropus associated gemykibivirus 1, Rhinolophus associated gemykibivirus 1, Rhinolophus associated gemykibivirus 2, Sewage derived gemykibivirus 1, Sewage derived gemykibivirus 2, Pteropus associated gemykolovirus 1, Pteropus associated gemykolovirus 2, Bovine associated gemykrogvirus 1, Caribou associated gemykrogvirus 1, Sewage derived gemykrogvirus 1, Rabbit associated gemykroznavirus 1, Ostrich associated gemytondvirus 1, Human associated gemyvongvirus 1, Alphapleolipovirus HHPV1, Alphapleolipovirus HHPV2, Alphapleolipovirus HRPV1, Alphapleolipovirus HRPV2, Alphapleolipovirus HRPV6, Betapleolipovirus HGPV1, Betapleolipovirus HHPV3, Betapleolipovirus HHPV4, Betapleolipovirus HRPV3, Betapleolipovirus HRPV9, Betapleolipovirus HRPV10, Betapleolipovirus HRPV11, Betapleolipovirus HRPV12, Betapleolipovirus SNJ2, Gammapleolipovirus His2, Amasya cherry disease associated chrysovirus, Anthurium mosaic-associated chrysovirus, Aspergillus fumigatus chrysovirus, Brassica campestris chrysovirus, Colletotrichum gloeosporioides chrysovirus, Cryphonectria nitschkei chrysovirus 1, Fusarium oxysporum chrysovirus 1, Helminthosporium victoriae virus 145S, Isaria javanica chrysovirus, Macrophomina phaseolina chrysovirus, Penicillium brevicompactum virus, Penicillium chrysogenum virus, Penicillium cyaneofulvum virus, Persea americana chrysovirus, Raphanus sativus chrysovirus, Shuangao insect-associated chrysovirus, Verticillium dahliae chrysovirus 1, Alternaria alternata chrysovirus, Botryosphaeria dothidea chrysovirus, Colletotrichum fructicola chrysovirus 1, Fusarium graminearum chrysovirus, Fusarium oxysporum chrysovirus 2, Magnaporthe oryzae chrysovirus, Penicillium janczewskii chrysovirus 1, Penicillium janczewskii chrysovirus 2, Rosellinia necatrix megabirnavirus 1, Rosellinia necatrix quadrivirus 1, Giardia lamblia virus, Leishmania RNA virus 1, Leishmania RNA virus 2, Saccharomyces cerevisiae virus L-A, Saccharomyces cerevisiae virus LBCLa, Scheffersomyces segobiensis virus L, Tuber aestivum virus 1, Ustilago maydis virus H1, Xanthophyllomyces dendrorhous virus L1A, Xanthophyllomyces dendrorhous virus LIB, Trichomonas vaginalis virus 1, Trichomonas vaginalis virus 2, Trichomonas vaginalis virus 3, Trichomonas vaginalis virus 4, Aspergillus foetidus slow virus 1, Beauveria bassiana victorivirus 1, Chalara elegans RNA Virus 1, Coniothyrium minitans RNA virus, Epichloe festucae virus 1, Gremmeniella abietina RNA virus L1, Helicobasidium mompa totivirus 1-17, Helminthosporium victoriae virus 190S, Magnaporthe oryzae virus 1, Magnaporthe oryzae virus 2, Rosellinia necatrix victorivirus 1, Sphaeropsis sapinea RNA virus 1, Sphaeropsis sapinea RNA virus 2, Tolypocladium cylindrosporum virus 1, Eriocheir sinensis reovirus, Micromonas pusilla reovirus, African horse sickness virus, Bluetongue virus, Changuinola virus, Chenuda virus, Chobar Gorge virus, Corriparta virus, Epizootic hemorrhagic disease virus, Equine encephalosis virus, Eubenangee virus, Great Island virus, leri virus, Lebombo virus, Orungo virus, Palyam virus, Peruvian horse sickness virus, St Croix River virus, Umatilla virus, Wad Medani virus, Wallal virus, Warrego virus, Wongorr virus, Yunnan orbivirus, Rice dwarf virus, Rice gall dwarf virus, Wound tumor virus, Rotavirus A, Rotavirus B, Rotavirus C, Rotavirus D, Rotavirus F, Rotavirus G, Rotavirus H, Rotavirus I, Rotavirus J, Banna virus, Kadipiro virus, Liao ning virus, Aquareovirus A, Aquareovirus B, Aquareovirus C, Aquareovirus D, Aquareovirus E, Aquareovirus F, Aquareovirus G, Colorado tick fever coltivirus, Eyach coltivirus, Kundal coltivirus, Tai Forest coltivirus, Tarumizu coltivirus, Cypovirus 1, Cypovirus 2, Cypovirus 3, Cypovirus 4, Cypovirus 5, Cypovirus 6, Cypovirus 7, Cypovirus 8, Cypovirus 9, Cypovirus 10, Cypovirus 11, Cypovirus 12, Cypovirus 13, Cypovirus 14, Cypovirus 15, Cypovirus 16, Aedes pseudoscutellaris reovirus, Fiji disease virus, Garlic dwarf virus, Maize rough dwarf virus, Mal de Rio Cuarto virus, Nilaparvata lugens reovirus, Oat sterile dwarf virus, Pangola stunt virus, Rice black streaked dwarf virus, Southern rice black-streaked dwarf virus, Idnoreovirus 1, Idnoreovirus 2, Idnoreovirus 3, Idnoreovirus 4, Idnoreovirus 5, Mycoreovirus 1, Mycoreovirus 2, Mycoreovirus 3, Avian orthoreovirus, Baboon orthoreovirus, Broome orthoreovirus, Mahlapitsi orthoreovirus, Mammalian orthoreovirus, Nelson Bay orthoreovirus, Neoavian orthoreovirus, Piscine orthoreovirus, Reptilian orthoreovirus, Testudine orthoreovirus, Echinochloa ragged stunt virus, Rice ragged stunt virus, Pseudomonas virus phi6, Pseudomonas virus phi8, Pseudomonas virus phi12, Pseudomonas virus phi13, Pseudomonas virus phi2954, Pseudomonas virus phiNN, Pseudomonas virus phiYY, Antheraea eucalypti virus, Darna trima virus, Dasychira pudibunda virus, Nudaurelia capensis beta virus, Philosamia cynthia×ricini virus, Pseudoplusia includens virus, Trichoplusia ni virus, Dendrolimus punctatus virus, Helicoverpa armigera stunt virus, Nudaurelia capensis omega virus, Beet necrotic yellow vein virus, Beet soil-borne mosaic virus, Burdock mottle virus, Rice stripe necrosis virus, Orthohepevirus A, Orthohepevirus B, Orthohepevirus C, Orthohepevirus D, Piscihepevirus A, Rubella virus, Alfalfa mosaic virus, Amazon lily mild mottle virus, Pelargonium zonate spot virus, Broad bean mottle virus, Brome mosaic virus, Cassia yellow blotch virus, Cowpea chlorotic mottle virus, Melandrium yellow fleck virus, Spring beauty latent virus, Cucumber mosaic virus, Gayfeather mild mottle virus, Peanut stunt virus, Tomato aspermy virus, Ageratum latent virus, American plum line pattern virus, Apple mosaic virus, Asparagus virus 2, Blackberry chlorotic ringspot virus, Blueberry shock virus, Citrus leaf rugose virus, Citrus variegation virus, Elm mottle virus, Fragaria chiloensis latent virus, Humulus japonicus latent virus, Lilac leaf chlorosis virus, Lilac ring mottle virus, Parietaria mottle virus, Privet ringspot virus, Prune dwarf virus, Prunus necrotic ringspot virus, Spinach latent virus, Strawberry necrotic shock virus, Tobacco streak virus, Tomato necrotic streak virus, Tulare apple mosaic virus, Olive latent virus 2, Air potato ampelovirus 1, Blackberry vein banding-associated virus, Grapevine leafroll-associated virus 1, Grapevine leafroll-associated virus 3, Grapevine leafroll-associated virus 4, Grapevine leafroll-associated virus 13, Little cherry virus 2, Pineapple mealybug wilt-associated virus 1, Pineapple mealybug wilt-associated virus 2, Pineapple mealybug wilt-associated virus 3, Pistachio ampelovirus A, Plum bark necrosis stem pitting-associated virus, Arracacha virus 1, Beet yellow stunt virus, Beet yellows virus, Blackcurrant closterovirus 1, Burdock yellows virus, Carnation necrotic fleck virus, Carrot yellow leaf virus, Citrus tristeza virus, Grapevine leafroll-associated virus 2, Mint virus 1, Raspberry leaf mottle virus, Rehmannia virus 1, Rose leaf rosette-associated virus, Strawberry chlorotic fleck-associated virus, Tobacco virus 1, Wheat yellow leaf virus, Abutilon yellows virus, Bean yellow disorder virus, Beet pseudoyellows virus, Blackberry yellow vein-associated virus, Cucurbit yellow stunting disorder virus, Diodia vein chlorosis virus, Lettuce chlorosis virus, Lettuce infectious yellows virus, Potato yellow vein virus, Strawberry pallidosis-associated virus, Sweet potato chlorotic stunt virus, Tetterwort vein chlorosis virus, Tomato chlorosis virus, Tomato infectious chlorosis virus, Areca palm velarivirus 1, Cordyline virus 1, Cordyline virus 2, Cordyline virus 3, Cordyline virus 4, Grapevine leafroll-associated virus 7, Little cherry virus 1, Actinidia virus 1, Alligatorweed stunting virus, Blueberry virus A, Megakepasma mosaic virus, Mint vein banding-associated virus, Olive leaf yellowing-associated virus, Persimmon virus B, Agaricus bisporus alphaendornavirus 1, Basella alba alphaendornavirus 1, Bell pepper alphaendornavirus, Cluster bean alphaendornavirus 1, Cucumis melo alphaendornavirus, Erysiphe cichoracearum alphaendornavirus, Grapevine endophyte alphaendornavirus, Helianthus annuus alphaendornavirus, Helicobasidium mompa alphaendornavirus 1, Hordeum vulgare alphaendornavirus, Hot pepper alphaendornavirus, Lagenaria siceraria alphaendornavirus, Oryza rufipogon alphaendornavirus, Oryza sativa alphaendornavirus, Persea americana alphaendornavirus 1, Phaseolus vulgaris alphaendornavirus 1, Phaseolus vulgaris alphaendornavirus 2, Phaseolus vulgaris alphaendornavirus 3, Phytophthora alphaendornavirus 1, Rhizoctonia cerealis alphaendornavirus 1, Rhizoctonia solani alphaendornavirus 2, Vicia faba alphaendornavirus, Winged bean alphaendornavirus 1, Yerba mate alphaendornavirus, Alternaria brassicicola betaendornavirus 1, Botrytis cinerea betaendornavirus 1, Gremmeniella abietina betaendornavirus 1, Rosellinia necatrix betaendornavirus 1, Sclerotinia minor betaendornavirus 1, Sclerotinia sclerotiorum betaendornavirus 1, Tuber aestivum betaendornavirus, Blueberry necrotic ring blotch virus, Tea plant necrotic ring blotch virus, Citrus leprosis virus C, Citrus leprosis virus C2, Hibiscus green spot virus 2, Privet idaeovirus, Raspberry bushy dwarf virus, Japanese holly fern mottle pteridovirus, Maize associated pteridovirus, Aura virus, Barmah Forest virus, Bebaru virus, Cabassou virus, Chikungunya virus, Eastern equine encephalitis virus, Eilat virus, Everglades virus, Fort Morgan virus, Getah virus, Highlands J virus, Madariaga virus, Mayaro virus, Middelburg virus, Mosso das Pedras virus, Mucambo virus, Ndumu virus, Onyong-nyong virus, Pixuna virus, Rio Negro virus, Ross River virus, Salmon pancreas disease virus, Semliki Forest virus, Sindbis virus, Southern elephant seal virus, Tonate virus, Trocara virus, Una virus, Venezuelan equine encephalitis virus, Western equine encephalitis virus, Whataroa virus, Chinese wheat mosaic virus, Japanese soil-borne wheat mosaic virus, Oat golden stripe virus, Soil-borne cereal mosaic virus, Soil-borne wheat mosaic virus, Sorghum chlorotic spot virus, Drakaea virus A, Gentian ovary ringspot virus, Anthoxanthum latent blanching virus, Barley stripe mosaic virus, Lychnis ringspot virus, Poa semilatent virus, Indian peanut clump virus, Peanut clump virus, Beet soil-borne virus, Beet virus Q, Broad bean necrosis virus, Colombian potato soil-borne virus, Potato mop-top virus, Bell pepper mottle virus, Brugmansia mild mottle virus, Cactus mild mottle virus, Clitoria yellow mottle virus, Cucumber fruit mottle mosaic virus, Cucumber green mottle mosaic virus, Cucumber mottle virus, Frangipani mosaic virus, Hibiscus latent Fort Pierce virus, Hibiscus latent Singapore virus, Kyuri green mottle mosaic virus, Maracuja mosaic virus, Obuda pepper virus, Odontoglossum ringspot virus, Opuntia chlorotic ringspot virus, Paprika mild mottle virus, Passion fruit mosaic virus, Pepper mild mottle virus, Plumeria mosaic virus, Rattail cactus necrosis-associated virus, Rehmannia mosaic virus, Ribgrass mosaic virus, Streptocarpus flower break virus, Sunn-hemp mosaic virus, Tobacco latent virus, Tobacco mild green mosaic virus, Tobacco mosaic virus, Tomato brown rugose fruit virus, Tomato mosaic virus, Tomato mottle mosaic virus, Tropical soda apple mosaic virus, Turnip vein-clearing virus, Ullucus mild mottle virus, Wasabi mottle virus, Yellow tailflower mild mottle virus, Youcai mosaic virus, Zucchini green mottle mosaic virus, Pea early-browning virus, Pepper ringspot virus, Tobacco rattle virus, Alfalfa virus S, Arachis pintoi virus, Blackberry virus E, Garlic mite-borne filamentous virus, Garlic virus A, Garlic virus B, Garlic virus C, Garlic virus D, Garlic virus E, Garlic virus X, Shallot virus X, Vanilla latent virus, Botrytis virus X, Lolium latent virus, Citrus yellow vein clearing virus, Indian citrus ringspot virus, Donkey orchid symptomless virus, Actinidia virus X, Allium virus X, Alstroemeria virus X, Alternanthera mosaic virus, Asparagus virus 3, Bamboo mosaic virus, Cactus virus X, Cassava common mosaic virus, Cassava virus X, Clover yellow mosaic virus, Cymbidium mosaic virus, Foxtail mosaic virus, Hosta virus X, Hydrangea ringspot virus, Lagenaria mild mosaic virus, Lettuce virus X, Lily virus X, Malva mosaic virus, Mint virus X, Narcissus mosaic virus, Nerine virus X, Opuntia virus X, Papaya mosaic virus, Pepino mosaic virus, Phaius virus X, Pitaya virus X, Plantago asiatica mosaic virus, Plantain virus X, Potato aucuba mosaic virus, Potato virus X, Schlumbergera virus X, Strawberry mild yellow edge virus, Tamus red mosaic virus, Tulip virus X, Vanilla virus X, White clover mosaic virus, Yam virus X, Zygocactus virus X, Sclerotinia sclerotiorum debilitation-associated RNA virus, Aconitum latent virus, American hop latent virus, Atractylodes mottle virus, Blueberry scorch virus, Butterbur mosaic virus, Cactus virus 2, Caper latent virus, Carnation latent virus, Chrysanthemum virus B, Cole latent virus, Coleus vein necrosis virus, Cowpea mild mottle virus, Cucumber vein-clearing virus, Daphne virus S, Gaillardia latent virus, Garlic common latent virus, Helenium virus S, Helleborus mosaic virus, Helleborus net necrosis virus, Hippeastrum latent virus, Hop latent virus, Hop mosaic virus, Hydrangea chlorotic mottle virus, Kalanchoe latent virus, Ligustrum necrotic ringspot virus, Ligustrum virus A, Lily symptomless virus, Melon yellowing-associated virus, Mirabilis jalapa mottle virus, Narcissus common latent virus, Nerine latent virus, Passiflora latent virus, Pea streak virus, Phlox virus B, Phlox virus M, Phlox virus S, Poplar mosaic virus, Potato latent virus, Potato virus H, Potato virus M, Potato virus P, Potato virus S, Red clover vein mosaic virus, Sambucus virus C, Sambucus virus D, Sambucus virus E, Shallot latent virus, Sint-Jan onion latent virus, Strawberry pseudo mild yellow edge virus, Sweet potato C6 virus, Sweet potato chlorotic fleck virus, Verbena latent virus, Yam latent virus, Apple stem pitting virus, Apricot latent virus, Asian prunus virus 1, Asian prunus virus 2, Grapevine rupestris stem pitting-associated virus, Grapevine virus T, Peach chlorotic mottle virus, Rubus canadensis virus 1, African oil palm ringspot virus, Cherry green ring mottle virus, Cherry necrotic rusty mottle virus, Cherry rusty mottle associated virus, Cherry twisted leaf associated virus, Banana mild mosaic virus, Banana virus X, Sugarcane striate mosaic-associated virus, Apple stem grooving virus, Cherry virus A, Currant virus A, Mume virus A, Carrot Ch virus 1, Carrot Ch virus 2, Citrus leaf blotch virus, Diuris virus A, Diuris virus B, Hardenbergia virus A, Actinidia seed borne latent virus, Apricot vein clearing associated virus, Caucasus prunus virus, Ribes americanum virus A, Potato virus T, Prunus virus T, Apple chlorotic leaf spot virus, Apricot pseudo-chlorotic leaf spot virus, Cherry mottle leaf virus, Grapevine berry inner necrosis virus, Grapevine Pinot gris virus, Peach mosaic virus, Phlomis mottle virus, Actinidia virus A, Actinidia virus B, Arracacha virus V, Blackberry virus A, Grapevine virus A, Grapevine virus B, Grapevine virus D, Grapevine virus E, Grapevine virus F, Grapevine virus G, Grapevine virus H, Grapevine virus I, Grapevine virus J, Heracleum latent virus, Mint virus 2, Watermelon virus A, Fusarium deltaflexivirus 1, Sclerotinia deltaflexivirus 1, Soybean-associated deltaflexivirus 1, Botrytis virus F, Grapevine fleck virus, Bermuda grass etched-line virus, Blackberry virus S, Citrus sudden death-associated virus, Grapevine asteroid mosaic associated virus, Grapevine Syrah virus 1, Maize rayado fino virus, Nectarine marafivirus M, Oat blue dwarf virus, Olive latent virus 3, Peach marafivirus D, Anagyris vein yellowing virus, Andean potato latent virus, Andean potato mild mosaic virus, Belladonna mottle virus, Cacao yellow mosaic virus, Calopogonium yellow vein virus, Chayote mosaic virus, Chiltepin yellow mosaic virus, Clitoria yellow vein virus, Desmodium yellow mottle virus, Dulcamara mottle virus, Eggplant mosaic virus, Erysimum latent virus, Kennedya yellow mosaic virus, Melon rugose mosaic virus, Nemesia ring necrosis virus, Okra mosaic virus, Ononis yellow mosaic virus, Passion fruit yellow mosaic virus, Peanut yellow mosaic virus, Petunia vein banding virus, Physalis mottle virus, Plantago mottle virus, Scrophularia mottle virus, Tomato blistering mosaic tymovirus, Turnip yellow mosaic virus, Voandzeia necrotic mosaic virus, Wild cucumber mosaic virus, Bombyx mori latent virus, Poinsettia mosaic virus, Apoi virus, Aroa virus, Bagaza virus, Banzi virus, Bouboui virus, Bukalasa bat virus, Cacipacore virus, Carey Island virus, Cowbone Ridge virus, Dakar bat virus, Dengue virus, Edge Hill virus, Entebbe bat virus, Gadgets Gully virus, Ilheus virus, Israel turkey meningoencephalomyelitis virus, Japanese encephalitis virus, Jugra virus, Jutiapa virus, Kadam virus, Kedougou virus, Kokobera virus, Koutango virus, Kyasanur Forest disease virus, Langat virus, Louping ill virus, Meaban virus, Modoc virus, Montana myotis leukoencephalitis virus, Murray Valley encephalitis virus, Ntaya virus, Omsk hemorrhagic fever virus, Phnom Penh bat virus, Powassan virus, Rio Bravo virus, Royal Farm virus, Saboya virus, Saint Louis encephalitis virus, Sal Vieja virus, San Perlita virus, Saumarez Reef virus, Sepik virus, Tembusu virus, Tick-borne encephalitis virus, Tyuleniy virus, Uganda S virus, Usutu virus, Wesselsbron virus, West Nile virus, Yaounde virus, Yellow fever virus, Yokose virus, Zika virus, Hepacivirus A, Hepacivirus B, Hepacivirus C, Hepacivirus D, Hepacivirus E, Hepacivirus F, Hepacivirus G, Hepacivirus H, Hepacivirus I, Hepacivirus J, Hepacivirus K, Hepacivirus L, Hepacivirus M, Hepacivirus N, Pegivirus A, Pegivirus B, Pegivirus C, Pegivirus D, Pegivirus E, Pegivirus F, Pegivirus G, Pegivirus H, Pegivirus I, Pegivirus J, Pegivirus K, Pestivirus A, Pestivirus B, Pestivirus C, Pestivirus D, Pestivirus E, Pestivirus F, Pestivirus G, Pestivirus H, Pestivirus I, Pestivirus J, Pestivirus K, Black beetle virus, Boolarra virus, Flock House virus, Nodamura virus, Pariacoto virus, Barfin flounder nervous necrosis virus, Redspotted grouper nervous necrosis virus, Striped jack nervous necrosis virus, Tiger puffer nervous necrosis virus, Lake Sinai virus 1, Lake Sinai virus 2, Providence virus, Alfalfa enamovirus 1, Birdsfoot trefoil enamovirus 1, Citrus vein enation virus, Grapevine enamovirus 1, Pea enation mosaic virus 1, Apple associated luteovirus, Apple luteovirus 1, Barley yellow dwarf virus kerII, Barley yellow dwarf virus kerIII, Barley yellow dwarf virus MAV, Barley yellow dwarf virus PAS, Barley yellow dwarf virus PAV, Bean leafroll virus, Cherry associated luteovirus, Nectarine stem pitting associated virus, Red clover associated luteovirus, Rose spring dwarf-associated virus, Soybean dwarf virus, Beet chlorosis virus, Beet mild yellowing virus, Beet western yellows virus, Carrot red leaf virus, Cereal yellow dwarf virus RPS, Cereal yellow dwarf virus RPV, Chickpea chlorotic stunt virus, Cotton leafroll dwarf virus, Cucurbit aphid-borne yellows virus, Faba bean polerovirus 1, Maize yellow dwarf virus RMV, Maize yellow mosaic virus, Melon aphid-borne yellows virus, Pepo aphid-borne yellows virus, Pepper vein yellows virus 1, Pepper vein yellows virus 2, Pepper vein yellows virus 3, Pepper vein yellows virus 4, Pepper vein yellows virus 5, Pepper vein yellows virus 6, Potato leafroll virus, Pumpkin polerovirus, Suakwa aphid-borne yellows virus, Sugarcane yellow leaf virus, Tobacco vein distorting virus, Turnip yellows virus, Barley yellow dwarf virus GPV, Barley yellow dwarf virus SGV, Chickpea stunt disease associated virus, Groundnut rosette assistor virus, Indonesian soybean dwarf virus, Sweet potato leaf speckling virus, Tobacco necrotic dwarf virus, Carrot mottle mimic virus, Carrot mottle virus, Ethiopian tobacco bushy top virus, Groundnut rosette virus, Lettuce speckles mottle virus, Opium poppy mosaic virus, Pea enation mosaic virus 2, Tobacco bushy top virus, Tobacco mottle virus, Angelonia flower break virus, Calibrachoa mottle virus, Carnation mottle virus, Honeysuckle ringspot virus, Nootka lupine vein clearing virus, Pelargonium flower break virus, Saguaro cactus virus, Olive latent virus 1, Olive mild mosaic virus, Potato necrosis virus, Tobacco necrosis virus A, Cucumber leaf spot virus, Johnsongrass chlorotic stripe mosaic virus, Maize white line mosaic virus, Pothos latent virus, Yam spherical virus, Oat chlorotic stunt virus, Cardamine chlorotic fleck virus, Hibiscus chlorotic ringspot virus, Japanese iris necrotic ring virus, Turnip crinkle virus, Beet black scorch virus, Leek white stripe virus, Tobacco necrosis virus D, Galinsoga mosaic virus, Cowpea mottle virus, Melon necrotic spot virus, Pea stem necrosis virus, Soybean yellow mottle mosaic virus, Furcraea necrotic streak virus, Maize chlorotic mottle virus, Cocksfoot mild mosaic virus, Panicum mosaic virus, Thin paspalum asymptomatic virus, Clematis chlorotic mottle virus, Elderberry latent virus, Pelargonium chlorotic ring pattern virus, Pelargonium line pattern virus, Pelargonium ringspot virus, Rosa rugosa leaf distortion virus, Artichoke mottled crinkle virus, Carnation Italian ringspot virus, Cucumber Bulgarian latent virus, Cucumber necrosis virus, Cymbidium ringspot virus, Eggplant mottled crinkle virus, Grapevine Algerian latent virus, Havel River virus, Lato River virus, Limonium flower distortion virus, Moroccan pepper virus, Neckar River virus, Pelargonium leaf curl virus, Pelargonium necrotic spot virus, Petunia asteroid mosaic virus, Sitke waterborne virus, Tomato bushy stunt virus, Maize necrotic streak virus, Ahlum waterborne virus, Bean mild mosaic virus, Chenopodium necrosis virus, Cucumber soil-borne virus, Trailing lespedeza virus 1, Weddel waterborne virus, Carnation ringspot virus, Red clover necrotic mosaic virus, Sweet clover necrotic mosaic virus, Escherichia virus FI, Escherichia virus Qbeta, Escherichia virus BZ13, Escherichia virus MS2, Saccharomyces 20S RNA narnavirus, Saccharomyces 23S RNA narnavirus, Cryphonectria mitovirus 1, Ophiostoma mitovirus 4, Ophiostoma mitovirus 5, Ophiostoma mitovirus 6, Ophiostoma mitovirus 3a, Botrytis botoulivirus, Sclerotinia botoulivirus 2, Magnaporthe magoulivirus 1, Rhizoctonia magoulivirus 1, Cassava virus C, Epirus cherry virus, Ourmia melon virus, Sclerotinia scleroulivirus 1, Soybean scleroulivirus 1, Soybean scleroulivirus 2, Beihai yingvirus, Charybdis yingvirus, Hubei yingvirus, Sanxia yingvirus, Shahe yingvirus, Wenzhou yingvirus, Wuhan yingvirus, Xinzhou yingvirus, Blueberry mosaic associated ophiovirus, Citrus psorosis ophiovirus, Freesia sneak ophiovirus, Lettuce ring necrosis ophiovirus, Mirafiori lettuce big-vein ophiovirus, Ranunculus white mottle ophiovirus, Tulip mild mottle mosaic ophiovirus, Argas mivirus, Barnacle mivirus, Beetle mivirus, Bole mivirus, Brunnich mivirus, Changping mivirus, Charybdis mivirus, Cockroach mivirus, Crab mivirus, Crustacean mivirus, Dermacentor mivirus, Hermit mivirus, Hippoboscid mivirus, Hubei mivirus, Hubei odonate mivirus, Imjin mivirus, Lacewing mivirus, Lishi mivirus, Lonestar mivirus, Louse fly mivirus, Mosquito mivirus, Myriapod mivirus, Odonate mivirus, Sanxia mivirus, Shayang mivirus, Suffolk mivirus, Taiyuan mivirus, Wenling mivirus, Wuhan mivirus, Xinzhou mivirus, Barnacle hexartovirus, Caligid hexartovirus, Beihai peropuvirus, Hubei peropuvirus, Odonate peropuvirus, Pillworm peropuvirus, Pteromalus puparum peropuvirus, Woodlouse peropuvirus, Queensland carbovirus, Southwest carbovirus, Sharpbelly cultervirus, Elapid 1 orthobornavirus, Mammalian 1 orthobornavirus, Mammalian 2 orthobornavirus, Passeriform 1 orthobornavirus, Passeriform 2 orthobornavirus, Psittaciform 1 orthobornavirus, Psittaciform 2 orthobornavirus, Waterbird 1 orthobornavirus, Lloviu cuevavirus, Mengla dianlovirus, Bombali ebolavirus, Bundibugyo ebolavirus, Reston ebolavirus, Sudan ebolavirus, Tai Forest ebolavirus, Zaire ebolavirus, Marburg marburgvirus, Xilang striavirus, Huangjiao thamnovirus, Gerrid arlivirus, Hubei arlivirus, Lishi arlivirus, Odonate arlivirus, Tacheng arlivirus, Wuchang arlivirus, Hubei hubramonavirus, Lentinula hubramonavirus, Dadou sclerotimonavirus, Drop sclerotimonavirus, Glycine sclerotimonavirus, Hubei sclerotimonavirus, Illinois sclerotimonavirus, Phyllosphere sclerotimonavirus, Sclerotinia sclerotimonavirus, Beihai berhavirus, Echinoderm berhavirus, Sipunculid berhavirus, Beihai crustavirus, Wenling crustavirus, Wenzhou crustavirus, Midway nyavirus, Nyamanini nyavirus, Sierra Nevada nyavirus, Orinoco orinovirus, Soybean cyst nematode socyvirus, Tapeworm tapwovirus, Avian metaavulavirus 2, Avian metaavulavirus 5, Avian metaavulavirus 6, Avian metaavulavirus 7, Avian metaavulavirus 8, Avian metaavulavirus 10, Avian metaavulavirus 11, Avian metaavulavirus 14, Avian metaavulavirus 15, Avian metaavulavirus 20, Avian orthoavulavirus 1, Avian orthoavulavirus 9, Avian orthoavulavirus 12, Avian orthoavulavirus 13, Avian orthoavulavirus 16, Avian orthoavulavirus 17, Avian orthoavulavirus 18, Avian orthoavulavirus 19, Avian orthoavulavirus 21, Avian orthovulavirus 21, Avian paraavulavirus 3, Avian paraavulavirus 4, Synodus synodonvirus, Oncorhynchus aquaparamyxovirus, Salmo aquaparamyxovirus, Reptilian ferlavirus, Cedar henipavirus, Ghanaian bat henipavirus, Hendra henipavirus, Mojiang henipavirus, Nipah henipavirus, Beilong jeilongvirus, Jun jeilongvirus, Lophuromys jeilongvirus 1, Lophuromys jeilongvirus 2, Miniopteran jeilongvirus, Myodes jeilongvirus, Tailam jeilongvirus, Canine morbillivirus, Cetacean morbillivirus, Feline morbillivirus, Measles morbillivirus, Phocine morbillivirus, Rinderpest morbillivirus, Small ruminant morbillivirus, Mossman narmovirus, Myodes narmovirus, Nariva narmovirus, Tupaia narmovirus, Bovine respirovirus 3, Caprine respirovirus 3, Human respirovirus 1, Human respirovirus 3, Murine respirovirus, Porcine respirovirus 1, Squirrel respirovirus, Salem salemvirus, Human orthorubulavirus 2, Human orthorubulavirus 4, Mammalian orthorubulavirus 5, Mammalian orthorubulavirus 6, Mapuera orthorubulavirus, Mumps orthorubulavirus, Porcine orthorubulavirus, Simian orthorubulavirus, Achimota pararubulavirus 1, Achimota pararubulavirus 2, Hervey pararubulavirus, Menangle pararubulavirus, Sosuga pararubulavirus, Teviot pararubulavirus, Tioman pararubulavirus, Tuhoko pararubulavirus 1, Tuhoko pararubulavirus 2, Tuhoko pararubulavirus 3, Cynoglossus cynoglossusvirus, Hoplichthys hoplichthysvirus, Scoliodon scoliodonvirus, Avian metapneumovirus, Human metapneumovirus, Bovine orthopneumovirus, Human orthopneumovirus, Murine orthopneumovirus, Arboretum almendravirus, Balsa almendravirus, Coot Bay almendravirus, Menghai almendravirus, Puerto Almendras almendravirus, Rio Chico almendravirus, Xingshan alphanemrhavirus, Xinzhou alphanemrhavirus, Eggplant mottled dwarf alphanucleorhabdovirus, Maize Iranian mosaic alphanucleorhabdovirus, Maize mosaic alphanucleorhabdovirus, Morogoro maize-associated alphanucleorhabdovirus, Physostegia chlorotic mottle alphanucleorhabdovirus, Potato yellow dwarf alphanucleorhabdovirus, Rice yellow stunt alphanucleorhabdovirus, Taro vein chlorosis alphanucleorhabdovirus, Wheat yellow striate alphanucleorhabdovirus, Aruac arurhavirus, Inhangapi arurhavirus, Santabarbara arurhavirus, Xiburema arurhavirus, Bahia barhavirus, Muir barhavirus, Alfalfa betanucleorhabdovirus, Blackcurrant betanucleorhabdovirus, Datura yellow vein betanucleorhabdovirus, Sonchus yellow net betanucleorhabdovirus, Sowthistle yellow vein betanucleorhabdovirus, Trefoil betanucleorhabdovirus, Caligus caligrhavirus, Lepeophtheirus caligrhavirus, Salmonlouse caligrhavirus, Curionopolis curiovirus, Iriri curiovirus, Itacaiunas curiovirus, Rochambeau curiovirus, Alfalfa dwarf cytorhabdovirus, Barley yellow striate mosaic cytorhabdovirus, Broccoli necrotic yellows cytorhabdovirus, Cabbage cytorhabdovirus, Colocasia bobone disease-associated cytorhabdovirus, Festuca leaf streak cytorhabdovirus, Lettuce necrotic yellows cytorhabdovirus, Lettuce yellow mottle cytorhabdovirus, Maize yellow striate cytorhabdovirus, Maize-associated cytorhabdovirus, Northern cereal mosaic cytorhabdovirus, Papaya cytorhabdovirus, Persimmon cytorhabdovirus, Raspberry vein chlorosis cytorhabdovirus, Rice stripe mosaic cytorhabdovirus, Sonchus cytorhabdovirus 1, Strawberry crinkle cytorhabdovirus, Tomato yellow mottle-associated cytorhabdovirus, Wheat American striate mosaic cytorhabdovirus, Wuhan 4 insect cytorhabdovirus, Wuhan 5 insect cytorhabdovirus, Wuhan 6 insect cytorhabdovirus, Yerba mate chlorosis-associated cytorhabdovirus, Citrus chlorotic spot dichorhavirus, Citrus leprosis N dichorhavirus, Clerodendrum chlorotic spot dichorhavirus, Coffee ringspot dichorhavirus, Orchid fleck dichorhavirus, Adelaide River ephemerovirus, Berrimah ephemerovirus, Bovine fever ephemerovirus, Kimberley ephemerovirus, Koolpinyah ephemerovirus, Kotonkan ephemerovirus, Obodhiang ephemerovirus, Yata ephemerovirus, Maize fine streak gammanucleorhabdovirus, Flanders hapavirus, Gray Lodge hapavirus, Hart Park hapavirus, Holmes hapavirus, Joinjakaka hapavirus, Kamese hapavirus, La Joya hapavirus, Landjia hapavirus, Manitoba hapavirus, Marco hapavirus, Mosqueiro hapavirus, Mossuril hapavirus, Ngaingan hapavirus, Ord River hapavirus, Parry Creek hapavirus, Wongabel hapavirus, Barur ledantevirus, Fikirini ledantevirus, Fukuoka ledantevirus, Kanyawara ledantevirus, Kern Canyon ledantevirus, Keuraliba ledantevirus, Kolente ledantevirus, Kumasi ledantevirus, Le Dantec ledantevirus, Mount Elgon bat ledantevirus, Nishimuro ledantevirus, Nkolbisson ledantevirus, Oita ledantevirus, Vaprio ledantevirus, Wuhan ledantevirus, Yongjia ledantevirus, Lonestar zarhavirus, Aravan lyssavirus, Australian bat lyssavirus, Bokeloh bat lyssavirus, Duvenhage lyssavirus, European bat 1 lyssavirus, European bat 2 lyssavirus, Gannoruwa bat lyssavirus, Ikoma lyssavirus, Irkut lyssavirus, Khujand lyssavirus, Lagos bat lyssavirus, Lleida bat lyssavirus, Mokola lyssavirus, Rabies lyssavirus, Shimoni bat lyssavirus, Taiwan bat lyssavirus, West Caucasian bat lyssavirus, Moussa mousrhavirus, Hirame novirhabdovirus, Piscine novirhabdovirus, Salmonid novirhabdovirus, Snakehead novirhabdovirus, Culex ohlsrhavirus, Northcreek ohlsrhavirus, Ohlsdorf ohlsrhavirus, Riverside ohlsrhavirus, Tongilchon ohlsrhavirus, Anguillid perhabdovirus, Perch perhabdovirus, Sea trout perhabdovirus, Connecticut sawgrhavirus, Island sawgrhavirus, Minto sawgrhavirus, Sawgrass sawgrhavirus, Drosophila affinis sigmavirus, Drosophila ananassae sigmavirus, Drosophila immigrans sigmavirus, Drosophila melanogaster sigmavirus, Drosophila obscura sigmavirus, Drosophila tristis sigmavirus, Muscina stabulans sigmavirus, Carp sprivivirus, Pike fry sprivivirus, Almpiwar sripuvirus, Chaco sripuvirus, Charleville sripuvirus, Cuiaba sripuvirus, Hainan sripuvirus, Niakha sripuvirus, Sena Madureira sripuvirus, Sripur sripuvirus, Garba sunrhavirus, Harrison sunrhavirus, Kwatta sunrhavirus, Oakvale sunrhavirus, Sunguru sunrhavirus, Walkabout sunrhavirus, Bas-Congo tibrovirus, Beatrice Hill tibrovirus, Coastal Plains tibrovirus, Ekpoma 1 tibrovirus, Ekpoma 2 tibrovirus, Sweetwater Branch tibrovirus, Tibrogargan tibrovirus, Durham tupavirus, Klamath tupavirus, Tupaia tupavirus, Lettuce big-vein associated varicosavirus, Alagoas vesiculovirus, American bat vesiculovirus, Carajas vesiculovirus, Chandipura vesiculovirus, Cocal vesiculovirus, Indiana vesiculovirus, Isfahan vesiculovirus, Jurona vesiculovirus, Malpais Spring vesiculovirus, Maraba vesiculovirus, Morreton vesiculovirus, New Jersey vesiculovirus, Perinet vesiculovirus, Piry vesiculovirus, Radi vesiculovirus, Yug Bogdanovac vesiculovirus, Zahedan zarhavirus, Reptile sunshinevirus 1, Bolahun anphevirus, Dipteran anphevirus, Drosophilid anphevirus, Odonate anphevirus, Orthopteran anphevirus, Shuangao anphevirus, Xincheng anphevirus, Beihai yuyuevirus, Shahe yuyuevirus, Hairy antennavirus, Striated antennavirus, Haartman hartmanivirus, Muikkunen hartmanivirus, Schoolhouse hartmanivirus, Zurich hartmanivirus, Allpahuayo mammarenavirus, Alxa mammarenavirus, Argentinian mammarenavirus, Bear Canyon mammarenavirus, Brazilian mammarenavirus, Cali mammarenavirus, Chapare mammarenavirus, Chevrier mammarenavirus, Cupixi mammarenavirus, Flexal mammarenavirus, Gairo mammarenavirus, Guanarito mammarenavirus, Ippy mammarenavirus, Lassa mammarenavirus, Latino mammarenavirus, Loei River mammarenavirus, Lujo mammarenavirus, Luna mammarenavirus, Lunk mammarenavirus, Lymphocytic choriomeningitis mammarenavirus, Machupo mammarenavirus, Mariental mammarenavirus, Merino Walk mammarenavirus, Mobala mammarenavirus, Mopeia mammarenavirus, Okahandja mammarenavirus, Oliveros mammarenavirus, Paraguayan mammarenavirus, Pirital mammarenavirus, Planalto mammarenavirus, Ryukyu mammarenavirus, Serra do Navio mammarenavirus, Solwezi mammarenavirus, Souris mammarenavirus, Tacaribe mammarenavirus, Tamiami mammarenavirus, Wenzhou mammarenavirus, Whitewater Arroyo mammarenavirus, Xapuri mammarenavirus, California reptarenavirus, Giessen reptarenavirus, Golden reptarenavirus, Ordinary reptarenavirus, Rotterdam reptarenavirus, Crustacean lincruvirus, Actinidia chlorotic ringspot-associated emaravirus, Blackberry leaf mottle associated emaravirus, European mountain ash ringspot-associated emaravirus, Fig mosaic emaravirus, High Plains wheat mosaic emaravirus, Pigeonpea sterility mosaic emaravirus 1, Pigeonpea sterility mosaic emaravirus 2, Pistacia emaravirus B, Raspberry leaf blotch emaravirus, Redbud yellow ringspot-associated emaravirus, Rose rosette emaravirus, Batfish actinovirus, Goosefish actinovirus, Spikefish actinovirus, Hagfish agnathovirus, Brno loanvirus, Longquan loanvirus, Laibin mobatvirus, Nova mobatvirus, Quezon mobatvirus, Andes orthohantavirus, Asama orthohantavirus, Asikkala orthohantavirus, Bayou orthohantavirus, Black Creek Canal orthohantavirus, Bowe orthohantavirus, Bruges orthohantavirus, Cano Delgadito orthohantavirus, Cao Bang orthohantavirus, Choclo orthohantavirus, Dabieshan orthohantavirus, Dobrava-Belgrade orthohantavirus, El Moro Canyon orthohantavirus, Fugong orthohantavirus, Fusong orthohantavirus, Hantaan orthohantavirus, Jeju orthohantavirus, Kenkeme orthohantavirus, Khabarovsk orthohantavirus, Laguna Negra orthohantavirus, Luxi orthohantavirus, Maporal orthohantavirus, Montano orthohantavirus, Necocli orthohantavirus, Oxbow orthohantavirus, Prospect Hill orthohantavirus, Puumala orthohantavirus, Rockport orthohantavirus, Sangassou orthohantavirus, Seewis orhtohantavirus, Seoul orthohantavirus, Sin Nombre orthohantavirus, Thailand orthohantavirus, Tigray orthohantavirus, Tula orthohantavirus, Yakeshi orthohantavirus, Imjin thottimvirus, Thottopalayam thottimvirus, Gecko reptillovirus, Leptomonas shilevirus, Myriapod hubavirus, Artashat orthonairovirus, Chim orthonairovirus, Crimean-Congo hemorrhagic fever orthonairovirus, Dera Ghazi Khan orthonairovirus, Dugbe orthonairovirus, Estero Real orthonairovirus, Hazara orthonairovirus, Hughes orthonairovirus, Kasokero orthonairovirus, Keterah orthonairovirus, Nairobi sheep disease orthonairovirus, Qalyub orthonairovirus, Sakhalin orthonairovirus, Tamdy orthonairovirus, Thiafora orthonairovirus, Spider shaspivirus, Strider striwavirus, Herbert herbevirus, Kibale herbevirus, Tai herbevirus, Acara orthobunyavirus, Aino orthobunyavirus, Akabane orthobunyavirus, Alajuela orthobunyavirus, Anadyr orthobunyavirus, Anhembi orthobunyavirus, Anopheles A orthobunyavirus, Anopheles B orthobunyavirus, Bakau orthobunyavirus, Batai orthobunyavirus, Batama orthobunyavirus, Bellavista orthobunyavirus, Benevides orthobunyavirus, Bertioga orthobunyavirus, Bimiti orthobunyavirus, Birao orthobunyavirus, Botambi orthobunyavirus, Bozo orthobunyavirus, Bunyamwera orthobunyavirus, Bushbush orthobunyavirus, Buttonwillow orthobunyavirus, Bwamba orthobunyavirus, Cache Valley orthobunyavirus, Cachoeira Porteira orthobunyavirus, California encephalitis orthobunyavirus, Capim orthobunyavirus, Caraparu orthobunyavirus, Cat Que orthobunyavirus, Catu orthobunyavirus, Enseada orthobunyavirus, Faceys paddock orthobunyavirus, Fort Sherman orthobunyavirus, Gamboa orthobunyavirus, Guajara orthobunyavirus, Guama orthobunyavirus, Guaroa orthobunyavirus, Iaco orthobunyavirus, Ilesha orthobunyavirus, Ingwavuma orthobunyavirus, Jamestown Canyon orthobunyavirus, Jatobal orthobunyavirus, Kaeng Khoi orthobunyavirus, Kairi orthobunyavirus, Keystone orthobunyavirus, Koongol orthobunyavirus, La Crosse orthobunyavirus, Leanyer orthobunyavirus, Lumbo orthbunyavirus, Macaua orthobunyavirus, Madrid orthobunyavirus, Maguari orthobunyavirus, Main Drain orthobunyavirus, Manzanilla orthobunyavirus, Marituba orthobunyavirus, Melao orthobunyavirus, Mermet orthobunyavirus, Minatitlan orthobunyavirus, MPoko orthobunyavirus, Nyando orthobunyavirus, Olifantsvlei orthobunyavirus, Oriboca orthobunyavirus, Oropouche orthobunyavirus, Patois orthobunyavirus, Peaton orthobunyavirus, Potosi orthobunyavirus, Sabo orthobunyavirus, San Angelo orthobunyavirus, Sango orthobunyavirus, Schmallenberg orthobunyavirus, Serra do Navio orthobunyavirus, Shuni orthobunyavirus, Simbu orthobunyavirus, Snowshoe hare orthobunyavirus, Sororoca orthobunyavirus, Tacaiuma orthobunyavirus, Tahyna orthobunyavirus, Tataguine orthobunyavirus, Tensaw orthobunyavirus, Tete orthobunyavirus, Thimiri orthobunyavirus, Timboteua orthobunyavirus, Trivittatus orthobunyavirus, Turlock orthobunyavirus, Utinga orthobunyavirus, Witwatersrand orthobunyavirus, Wolkberg orthobunyavirus, Wyeomyia orthobunyavirus, Zegla orthobunyavirus, Caimito pacuvirus, Chilibre pacuvirus, Pacui pacuvirus, Rio Preto da Eva pacuvirus, Tapirape pacuvirus, Insect shangavirus, Ferak feravirus, Jonchet jonvirus, Anopheles orthophasmavirus, Culex orthophasmavirus, Ganda orthophasmavirus, Kigluaik phantom orthophasmavirus, Odonate orthophasmavirus, Qingling orthophasmavirus, Wuchang cockroach orthophasmavirus 1, Wuhan mosquito orthophasmavirus 1, Wuhan mosquito orthophasmavirus 2, Sanxia sawastrivirus, Insect wuhivirus, Bhanja bandavirus, Dabie bandavirus, Guertu bandavirus, Heartland bandavirus, Hunter Island bandavirus, Kismaayo bandavirus, Lone Star bandavirus, Dipteran beidivirus, Citrus coguvirus, Coguvirus eburi, Entoleuca entovirus, Cumuto goukovirus, Gouleako goukovirus, Yichang insect goukovirus, Horsefly horwuvirus, Dipteran hudivirus, Lepidopteran hudovirus, Blackleg ixovirus, Norway ixovirus, Scapularis ixovirus, Laurel Lake laulavirus, Lentinula lentinuvirus, Mothra mobuvirus, Badu phasivirus, Dipteran phasivirus, Fly phasivirus, Phasi Charoen-like phasivirus, Wutai mosquito phasivirus, Adana phlebovirus, Aguacate phlebovirus, Alcube phlebovirus, Alenquer phlebovirus, Ambe phlebovirus, Anhanga phlebovirus, Arumowot phlebovirus, Buenaventura phlebovirus, Bujaru phlebovirus, Cacao phlebovirus, Campana phlebovirus, Candiru phlebovirus, Chagres phlebovirus, Cock phlebovirus, Dashli phlebovirus, Durania phlebovirus, Echarate phlebovirus, Frijoles phlebovirus, Gabek phlebovirus, Gordil phlebovirus, Icoaraci phlebovirus, Itaituba phlebovirus, Itaporanga phlebovirus, Ixcanal phlebovirus, Karimabad phlebovirus, La Gloria phlebovirus, Lara phlebovirus, Leticia phlebovirus, Maldonado phlebovirus, Massilia phlebovirus, Medjerda phlebovirus, Mona Grita phlebovirus, Mukawa phlebovirus, Munguba phlebovirus, Naples phlebovirus, Nique phlebovirus, Ntepes phlebovirus, Odrenisrou phlebovirus, Oriximina phlebovirus, Pena Blanca phlebovirus, Punique phlebovirus, Punta Toro phlebovirus, Rift Valley fever phlebovirus, Rio Grande phlebovirus, Saint Floris phlebovirus, Salanga phlebovirus, Salehabad phlebovirus, Salobo phlabovirus, Sicilian phlebovirus, Tapara phlebovirus, Tehran phlebovirus, Tico phebovirus, Toros phlebovirus, Toscana phlebovirus, Tres Almendras phlebovirus, Turuna phlebovirus, Uriurana phlebovirus, Urucuri phlebovirus, Viola phlebovirus, Zerdali phlebovirus, Pidgey pidchovirus, Apple rubodvirus 1, Apple rubodvirus 2, Echinochloa hoja blanca tenuivirus, Iranian wheat stripe tenuivirus, Maize stripe tenuivirus, Melon tenuivirus, Rice grassy stunt tenuivirus, Rice hoja blanca tenuivirus, Rice stripe tenuivirus, Urochloa hoja blanca tenuivirus, American dog uukuvirus, Dabieshan uukuvirus, Grand Arbaud uukuvirus, Huangpi uukuvirus, Kabuto mountain uukuvirus, Kaisodi uukuvirus, Lihan uukuvirus, Murre uukuvirus, Pacific coast uukuvirus, Precarious Point uukuvirus, Rukutama uukuvirus, Schmidt uukuvirus, Silverwater uukuvirus, Tacheng uukuvirus, Uukuniemi uukuvirus, Yongjia uukuvirus, Zaliv Terpeniya uukuvirus, Shrimp wenrivirus, Alstroemeria necrotic streak orthotospovirus, Alstroemeria yellow spot orthotospovirus, Bean necrotic mosaic orthotospovirus, Calla lily chlorotic spot orthotospovirus, Capsicum chlorosis orthotospovirus, Chrysanthemum stem necrosis orthotospovirus, Groundnut bud necrosis orthotospovirus, Groundnut chlorotic fan spot orthotospovirus, Groundnut ringspot orthotospovirus, Groundnut yellow spot orthotospovirus, Hippeastrum chlorotic ringspot orthotospovirus, Impatiens necrotic spot orthotospovirus, Iris yellow spot orthotospovirus, Melon severe mosaic orthotospovirus, Melon yellow spot orthotospovirus, Mulberry vein banding associated orthotospovirus, Pepper chlorotic spot orthotospovirus, Polygonum ringspot orthotospovirus, Soybean vein necrosis orthotospovirus, Tomato chlorotic spot orthotospovirus, Tomato spotted wilt orthotospovirus, Tomato yellow ring orthotospovirus, Tomato zonate spot orthotospovirus, Watermelon bud necrosis orthotospovirus, Watermelon silver mottle orthotospovirus, Zucchini lethal chlorosis orthotospovirus, Millipede wumivirus, Tilapia tilapinevirus, Influenza A virus, Influenza B virus, Influenza D virus, Influenza C virus, Salmon isavirus, Johnston Atoll quaranjavirus, Quaranfil quaranjavirus, Dhori thogotovirus, Thogoto thogotovirus, Allium cepa amalgavirus 1, Allium cepa amalgavirus 2, Blueberry latent virus, Rhododendron virus A, Southern tomato virus, Spinach amalgavirus 1, Vicia cryptic virus M, Zoostera marina amalgavirus 1, Zoostera marina amalgavirus 2, Zygosaccharomyces bailii virus Z, Cryphonectria hypovirus 1, Cryphonectria hypovirus 2, Cryphonectria hypovirus 3, Cryphonectria hypovirus 4, Beet cryptic virus 1, Carrot cryptic virus, Cherry chlorotic rusty spot associated partitivirus, Chondrostereum purpureum cryptic virus 1, Flammulina velutipes browning virus, Helicobasidium mompa partitivirus V70, Heterobasidion partitivirus 1, Heterobasidion partitivirus 3, Heterobasidion partitivirus 12, Heterobasidion partitivirus 13, Heterobasidion partitivirus 15, Rosellinia necatrix partitivirus 2, Vicia cryptic virus, White clover cryptic virus 1, Atkinsonella hypoxylon virus, Cannabis cryptic virus, Ceratocystis resinifera virus 1, Crimson clover cryptic virus 2, Dill cryptic virus 2, Fusarium poae virus 1, Heterobasidion partitivirus 2, Heterobasidion partitivirus 7, Heterobasidion partitivirus 8, Heterobasidion partitivirus P, Hop trefoil cryptic virus 2, Pleurotus ostreatus virus 1, Primula malacoides virus 1, Red clover cryptic virus 2, Rhizoctonia solani virus 717, Rosellinia necatrix virus 1, White clover cryptic virus 2, Cryptosporidium parvum virus 1, Beet cryptic virus 2, Beet cryptic virus 3, Fig cryptic virus, Pepper cryptic virus 1, Pepper cryptic virus 2, Aspergillus ochraceous virus, Discula destructiva virus 1, Discula destructiva virus 2, Fusarium solani virus 1, Gremmeniella abietina RNA virus MS1, Ophiostoma partitivirus 1, Penicillium stoloniferum virus F, Penicillium stoloniferum virus S, Agaricus bisporus virus 4, Alfalfa cryptic virus 1, Carnation cryptic virus 1, Carrot temperate virus 1, Carrot temperate virus 2, Carrot temperate virus 3, Carrot temperate virus 4, Gaeumannomyces graminis virus 0196A, Gaeumannomyces graminis virus T1A, Hop trefoil cryptic virus 1, Hop trefoil cryptic virus 3, Radish yellow edge virus, Ryegrass cryptic virus, Spinach temperate virus, White clover cryptic virus 3, Beihai picobirnavirus, Equine picobirnavirus, Human picobirnavirus, Aplysia abyssovirus 1, Muarterivirus afrigant, Alphaarterivirus equid, Lambdaarterivirus afriporav, Deltaarterivirus hemfev, Epsilonarterivirus hemcep, Epsilonarterivirus safriver, Epsilonarterivirus zamalb, Etaarterivirus ugarco 1, Iotaarterivirus debrazmo, Iotaarterivirus kibreg 1, Iotaarterivirus pejah, Thetaarterivirus kafuba, Thetaarterivirus mikelba 1, Zetaarterivirus ugarco 1, Betaarterivirus suid 2, Betaarterivirus chinrav 1, Betaarterivirus ninrav, Betaarterivirus sheoin, Betaarterivirus suid 1, Betaarterivirus timiclar, Gammaarterivirus lacdeh, Nuarterivirus guemel, Kappaarterivirus wobum, Chinturpovirus 1, Ptyasnivirus 1, Oligodon snake nidovirus 1, Microhyla letovirus 1, Bat coronavirus CDPHE15, Bat coronavirus HKU10, Rhinolophus ferrumequinum alphacoronavirus HuB-2013, Human coronavirus 229E, Lucheng Rn rat coronavirus, Mink coronavirus 1, Miniopterus bat coronavirus 1, Miniopterus bat coronavirus HKU8, Myotis ricketti alphacoronavirus Sax-2011, Nyctalus velutinus alphacoronavirus SC-2013, Pipistrellus kuhlii coronavirus 3398, Porcine epidemic diarrhea virus, Scotophilus bat coronavirus 512, Rhinolophus bat coronavirus HKU2, Human coronavirus NL63, NL63-related bat coronavirus strain BtKYNL63-9b, Sorex araneus coronavirus T14, Suncus murinus coronavirus X74, Alphacoronavirus 1, Betacoronavirus 1, China Rattus coronavirus HKU24, Human coronavirus HKU1, Murine coronavirus, Myodes coronavirus 2JL14, Bat Hp-betacoronavirus Zhejiang2013, Hedgehog coronavirus 1, Middle East respiratory syndrome-related coronavirus, Pipistrellus bat coronavirus HKU5, Tylonycteris bat coronavirus HKU4, Eidolon bat coronavirus C704, Rousettus bat coronavirus GCCDC1, Rousettus bat coronavirus HKU9, Severe acute respiratory syndrome-related coronavirus, Wigeon coronavirus HKU20, Bulbul coronavirus HKU11, Common moorhen coronavirus HKU21, Coronavirus HKU15, Munia coronavirus HKU13, White-eye coronavirus HKU16, Night heron coronavirus HKU19, Goose coronavirus CB17, Beluga whale coronavirus SW1, Avian coronavirus, Avian coronavirus 9203, Duck coronavirus 2714, Turrinivirus 1, Botrylloides leachii nidovirus, Alphamesonivirus 4, Alphamesonivirus 8, Alphamesonivirus 5, Alphamesonivirus 7, Alphamesonivirus 2, Alphamesonivirus 3, Alphamesonivirus 9, Alphamesonivirus 1, Alphamesonivirus 10, Alphamesonivirus 6, Planidovirus 1, Nangarvirus 1, Halfbeak nidovirus 1, Charybnivirus 1, Decronivirus 1, Paguronivirus 1, Gill-associated virus, Okavirus 1, Yellow head virus, White bream virus, Fathead minnow nidovirus 1, Chinook salmon nidovirus 1, Bovine nidovirus 1, Hebius tobanivirus 1, Infratovirus 1, Lycodon tobanivirus 1, Ball python nidovirus 1, Morelia tobanivirus 1, Berisnavirus 1, Shingleback nidovirus 1, Sectovirus 1, Bovine torovirus, Equine torovirus, Porcine torovirus, Bavaria virus, European brown hare syndrome virus, Rabbit hemorrhagic disease virus, Minovirus A, Nacovirus A, Newbury 1 virus, Norwalk virus, Recovirus A, Nordland virus, Sapporo virus, Saint Valerien virus, Feline calicivirus, Vesicular exanthema of swine virus, Acute bee paralysis virus, Israeli acute paralysis virus, Kashmir bee virus, Mud crab virus, Solenopsis invicta virus 1, Taura syndrome virus, Aphid lethal paralysis virus, Cricket paralysis virus, Drosophila C virus, Rhopalosiphum padi virus, Black queen cell virus, Himetobi P virus, Homalodisca coagulata virus 1, Plautia stali intestine virus, Triatoma virus, Antheraea pernyi iflavirus, Brevicoryne brassicae virus, Deformed wing virus, Dinocampus coccinellae paralysis virus, Ectropis obliqua virus, Infectious flacherie virus, Lygus lineolaris virus 1, Lymantria dispar iflavirus 1, Nilaparvata lugens honeydew virus 1, Perina nuda virus, Sacbrood virus, Slow bee paralysis virus, Spodoptera exigua iflavirus 1, Spodoptera exigua iflavirus 2, Varroa destructor virus 1, Chaetoceros socialis forma radians RNA virus 1, Chaetoceros tenuissimus RNA virus 01, Rhizosolenia setigera RNA virus 01, Astarnavirus, Aurantiochytrium single-stranded RNA virus 01, Jericarnavirus B, Sanfarnavirus 1, Sanfarnavirus 2, Sanfarnavirus 3, Heterosigma akashiwo RNA virus, Britarnavirus 1, Britarnavirus 4, Palmarnavirus 128, Palmarnavirus 473, Britarnavirus 2, Britarnavirus 3, Chaetarnavirus 2, Chaetenuissarnavirus II, Jericarnavirus A, Palmarnavirus 156, Aalivirus A, Ailurivirus A, Ampivirus A, Anativirus A, Anativirus B, Bovine rhinitis A virus, Bovine rhinitis B virus, Equine rhinitis A virus, Foot-and-mouth disease virus, Aquamavirus A, Avihepatovirus A, Avisivirus A, Avisivirus B, Avisivirus C, Boosepivirus A, Boosepivirus B, Boosepivirus C, Bopivirus A, Cardiovirus A, Cardiovirus B, Cardiovirus C, Cardiovirus D, Cardiovirus E, Cardiovirus F, Cosavirus A, Cosavirus B, Cosavirus D, Cosavirus E, Cosavirus F, Crahelivirus A, Crohivirus A, Crohivirus B, Cadicivirus A, Cadicivirus B, Diresapivirus A, Diresapivirus B, Enterovirus A, Enterovirus B, Enterovirus C, Enterovirus D, Enterovirus E, Enterovirus F, Enterovirus G, Enterovirus H, Enterovirus I, Enterovirus J, Enterovirus K, Enterovirus L, Rhinovirus A, Rhinovirus B, Rhinovirus C, Erbovirus A, Felipivirus A, Fipivirus A, Fipivirus B, Fipivirus C, Fipivirus D, Fipivirus E, Gallivirus A, Gruhelivirus A, Grusopivirus A, Grusopivirus B, Harkavirus A, Hemipivirus A, Hepatovirus A, Hepatovirus B, Hepatovirus C, Hepatovirus D, Hepatovirus E, Hepatovirus F, Hepatovirus G, Hepatovirus H, Hepatovirus I, Hunnivirus A, Aichivirus A, Aichivirus B, Aichivirus C, Aichivirus D, Aichivirus E, Aichivirus F, Kunsagivirus A, Kunsagivirus B, Kunsagivirus C, Limnipivirus A, Limnipivirus B, Limnipivirus C, Livupivirus A, Ludopivirus A, Malagasivirus A, Malagasivirus B, Megrivirus A, Megrivirus B, Megrivirus C, Megrivirus D, Megrivirus E, Mischivirus A, Mischivirus B, Mischivirus C, Mischivirus D, Mosavirus A, Mosavirus B, Mupivirus A, Myrropivirus A, Orivirus A, Oscivirus A, Parabovirus A, Parabovirus B, Parabovirus C, Parechovirus A, Parechovirus B, Parechovirus C, Parechovirus D, Parechovirus E, Parechovirus F, Pasivirus A, Passerivirus A, Passerivirus B, Pemapivirus A, Poecivirus A, Potamipivirus A, Potamipivirus B, Rabovirus A, Rabovirus B, Rabovirus C, Rabovirus D, Rafivirus A, Rafivirus B, Rafivirus C, Rohelivirus A, Rosavirus A, Rosavirus B, Rosavirus C, Sakobuvirus A, Salivirus A, Sapelovirus A, Sapelovirus B, Senecavirus A, Shanbavirus A, Sicinivirus A, Symapivirus A, Teschovirus A, Teschovirus B, Torchivirus A, Tottorivirus A, Tremovirus A, Tremovirus B, Tropivirus A, Chironomus riparius virus 1, Hubei chipolycivirus, Hubei hupolycivirus, Formica exsecta virus 3, Lasius neglectus virus 1, Lasius neglectus virus 2, Lasius niger virus 1, Linepithema humile virus 2, Monomorium pharaonis virus 1, Monomorium pharaonis virus 2, Myrmica scabrinodis virus 1, Shuangao insect virus 8, Solenopsis invicta virus 2, Solenopsis invicta virus 4, Andean potato mottle virus, Bean pod mottle virus, Bean rugose mosaic virus, Broad bean stain virus, Broad bean true mosaic virus, Cowpea mosaic virus, Cowpea severe mosaic virus, Glycine mosaic virus, Pea green mottle virus, Pea mild mosaic virus, Quail pea mosaic virus, Radish mosaic virus, Red clover mottle virus, Squash mosaic virus, Ullucus virus C, Broad bean wilt virus 1, Broad bean wilt virus 2, Cucurbit mild mosaic virus, Gentian mosaic virus, Grapevine fabavirus, Lamium mild mosaic virus, Prunus virus F, Aeonium ringspot virus, Apricot latent ringspot virus, Arabis mosaic virus, Arracacha virus A, Artichoke Aegean ringspot virus, Artichoke Italian latent virus, Artichoke yellow ringspot virus, Beet ringspot virus, Blackcurrant reversion virus, Blueberry latent spherical virus, Blueberry leaf mottle virus, Cassava American latent virus, Cassava green mottle virus, Cherry leaf roll virus, Chicory yellow mottle virus, Cocoa necrosis virus, Crimson clover latent virus, Cycas necrotic stunt virus, Grapevine Anatolian ringspot virus, Grapevine Bulgarian latent virus, Grapevine chrome mosaic virus, Grapevine deformation virus, Grapevine fanleaf virus, Grapevine Tunisian ringspot virus, Hibiscus latent ringspot virus, Lucerne Australian latent virus, Melon mild mottle virus, Mulberry mosaic leaf roll associated virus, Mulberry ringspot virus, Myrobalan latent ringspot virus, Olive latent ringspot virus, Peach rosette mosaic virus, Potato black ringspot virus, Potato virus B, Potato virus U, Raspberry ringspot virus, Soybean latent spherical virus, Tobacco ringspot virus, Tomato black ring virus, Tomato ringspot virus, Apple latent spherical virus, Arracacha virus B, Cherry rasp leaf virus, Currant latent virus, Stocky prune virus, Chocolate lily virus A, Dioscorea mosaic associated virus, Satsuma dwarf virus, Black raspberry necrosis virus, Strawberry mottle virus, Carrot necrotic dieback virus, Dandelion yellow mosaic virus, Parsnip yellow fleck virus, Carrot torradovirus 1, Lettuce necrotic leaf curl virus, Motherwort yellow mottle virus, Squash chlorotic leaf spot virus, Tomato marchitez virus, Tomato torrado virus, Anthriscus yellows virus, Bellflower vein chlorosis virus, Maize chlorotic dwarf virus, Rice tungro spherical virus, Strawberry latent ringspot virus, Solenopsis invicta virus 3, Nylanderia fulva virus 1, Heterocapsa circularisquama RNA virus 01, Mushroom bacilliform virus, Poinsettia latent virus, Artemisia virus A, Blueberry shoestring virus, Cocksfoot mottle virus, Cymbidium chlorotic mosaic virus, Imperata yellow mottle virus, Lucerne transient streak virus, Papaya lethal yellowing virus, Rice yellow mottle virus, Rottboellia yellow mottle virus, Ryegrass mottle virus, Sesbania mosaic virus, Solanum nodiflorum mottle virus, Southern bean mosaic virus, Southern cowpea mosaic virus, Sowbane mosaic virus, Soybean yellow common mosaic virus, Subterranean clover mottle virus, Turnip rosette virus, Velvet tobacco mottle virus, Areca palm necrotic ringspot virus, Areca palm necrotic spindle-spot virus, Bellflower veinal mottle virus, Blackberry virus Y, Barley mild mosaic virus, Barley yellow mosaic virus, Oat mosaic virus, Rice necrosis mosaic virus, Wheat spindle streak mosaic virus, Wheat yellow mosaic virus, Celery latent virus, Cassava brown streak virus, Coccinia mottle virus, Cucumber vein yellowing virus, Squash vein yellowing virus, Sweet potato mild mottle virus, Tomato mild mottle virus, Ugandan cassava brown streak virus, Alpinia mosaic virus, Alpinia oxyphylla mosaic virus, Artichoke latent virus, Broad-leafed dock virus A, Cardamom mosaic virus, Chinese yam necrotic mosaic virus, Maclura mosaic virus, Narcissus latent virus, Yam chlorotic mosaic virus, Yam chlorotic necrosis virus, Caladenia virus A, Sugarcane streak mosaic virus, Triticum mosaic virus, African eggplant mosaic virus, Algerian watermelon mosaic virus, Alstroemeria mosaic virus, Alternanthera mild mosaic virus, Amaranthus leaf mottle virus, Amazon lily mosaic virus, Angelica virus Y, Apium virus Y, Araujia mosaic virus, Arracacha mottle virus, Asparagus virus 1, Banana bract mosaic virus, Barbacena virus Y, Basella rugose mosaic virus, Bean common mosaic necrosis virus, Bean common mosaic virus, Bean yellow mosaic virus, Beet mosaic virus, Bidens mosaic virus, Bidens mottle virus, Blue squill virus A, Brugmansia mosaic virus, Brugmansia suaveolens mottle virus, Butterfly flower mosaic virus, Calanthe mild mosaic virus, Calla lily latent virus, Callistephus mottle virus, Canna yellow streak virus, Carnation vein mottle virus, Carrot thin leaf virus, Carrot virus Y, Catharanthus mosaic virus, Celery mosaic virus, Ceratobium mosaic virus, Chilli ringspot virus, Chilli veinal mottle virus, Chinese artichoke mosaic virus, Clitoria virus Y, Clover yellow vein virus, Cocksfoot streak virus, Colombian datura virus, Commelina mosaic virus, Cowpea aphid-borne mosaic virus, Cucurbit vein banding virus, Cypripedium virus Y, Cyrtanthus elatus virus A, Daphne mosaic virus, Daphne virus Y, Dasheen mosaic virus, Datura shoestring virus, Dendrobium chlorotic mosaic virus, Dioscorea mosaic virus, Diuris virus Y, Donkey orchid virus A, East Asian Passiflora distortion virus, East Asian Passiflora virus, Endive necrotic mosaic virus, Euphorbia ringspot virus, Freesia mosaic virus, Fritillary virus Y, Gloriosa stripe mosaic virus, Gomphocarpus mosaic virus, Habenaria mosaic virus, Hardenbergia mosaic virus, Henbane mosaic virus, Hibbertia virus Y, Hippeastrum mosaic virus, Hyacinth mosaic virus, Impatiens flower break virus, Iris fulva mosaic virus, Iris mild mosaic virus, Iris severe mosaic virus, Japanese yam mosaic virus, Jasmine virus T, Johnsongrass mosaic virus, Kalanchoe mosaic virus, Keunjorong mosaic virus, Konjac mosaic virus, Leek yellow stripe virus, Lettuce Italian necrotic virus, Lettuce mosaic virus, Lily mottle virus, Lily virus Y, Lupinus mosaic virus, Lycoris mild mottle virus, Maize dwarf mosaic virus, Malva vein clearing virus, Mashua virus Y, Meadow saffron breaking virus, Mediterranean ruda virus, Moroccan watermelon mosaic virus, Narcissus degeneration virus, Narcissus late season yellows virus, Narcissus yellow stripe virus, Nerine yellow stripe virus, Nothoscordum mosaic virus, Onion yellow dwarf virus, Ornithogalum mosaic virus, Ornithogalum virus 2, Ornithogalum virus 3, Panax virus Y, Papaya leaf distortion mosaic virus, Papaya ringspot virus, Paris mosaic necrosis virus, Parsnip mosaic virus, Passiflora chlorosis virus, Passion fruit woodiness virus, Pea seed-borne mosaic virus, Peanut mottle virus, Pecan mosaic-associated virus, Pennisetum mosaic virus, Pepper mottle virus, Pepper severe mosaic virus, Pepper veinal mottle virus, Pepper yellow mosaic virus, Peru tomato mosaic virus, Pfaffia mosaic virus, Platycodon mild mottle virus, Pleione virus Y, Plum pox virus, Pokeweed mosaic virus, Potato virus A, Potato virus V, Potato virus Y, Potato yellow blotch virus, Ranunculus leaf distortion virus, Ranunculus mild mosaic virus, Ranunculus mosaic virus, Rhopalanthe virus Y, Saffron latent virus, Sarcochilus virus Y, Scallion mosaic virus, Shallot yellow stripe virus, Sorghum mosaic virus, Soybean mosaic virus, Spiranthes mosaic virus 3, Sudan watermelon mosaic virus, Sugarcane mosaic virus, Sunflower chlorotic mottle virus, Sunflower mild mosaic virus, Sunflower mosaic virus, Sunflower ring blotch virus, Sweet potato feathery mottle virus, Sweet potato latent virus, Sweet potato mild speckling virus, Sweet potato virus 2, Sweet potato virus C, Sweet potato virus G, Tamarillo leaf malformation virus, Telfairia mosaic virus, Telosma mosaic virus, Thunberg fritillary mosaic virus, Tobacco etch virus, Tobacco mosqueado virus, Tobacco vein banding mosaic virus, Tobacco vein mottling virus, Tomato necrotic stunt virus, Tradescantia mild mosaic virus, Tuberose mild mosaic virus, Tuberose mild mottle virus, Tulip breaking virus, Tulip mosaic virus, Turnip mosaic virus, Twisted-stalk chlorotic streak virus, Vallota mosaic virus, Vanilla distortion mosaic virus, Verbena virus Y, Watermelon leaf mottle virus, Watermelon mosaic virus, Wild melon banding virus, Wild onion symptomless virus, Wild potato mosaic virus, Wild tomato mosaic virus, Wisteria vein mosaic virus, Yam mild mosaic virus, Yam mosaic virus, Yambean mosaic virus, Zantedeschia mild mosaic virus, Zea mosaic virus, Zucchini shoestring virus, Zucchini tigre mosaic virus, Zucchini yellow fleck virus, Zucchini yellow mosaic virus, Passiflora edulis symptomless virus, Rose yellow mosaic virus, Agropyron mosaic virus, Hordeum mosaic virus, Ryegrass mosaic virus, Brome streak mosaic virus, Oat necrotic mottle virus, Tall oatgrass mosaic virus, Wheat eqlid mosaic virus, Wheat streak mosaic virus, Yellow oat grass mosaic virus, Common reed chlorotic stripe virus, Longan witches broom-associated virus, Spartina mottle virus, Avastrovirus 1, Avastrovirus 2, Avastrovirus 3, Mamastrovirus 1, Mamastrovirus 2, Mamastrovirus 3, Mamastrovirus 4, Mamastrovirus 5, Mamastrovirus 6, Mamastrovirus 7, Mamastrovirus 8, Mamastrovirus 9, Mamastrovirus 10, Mamastrovirus 11, Mamastrovirus 12, Mamastrovirus 13, Mamastrovirus 14, Mamastrovirus 15, Mamastrovirus 16, Mamastrovirus 17, Mamastrovirus 18, Mamastrovirus 19, Infectious pancreatic necrosis virus, Tellina virus, Yellowtail ascites virus, Infectious bursal disease virus, Blotched snakehead virus, Lates calcarifer birnavirus, Drosophina B birnavirus, Drosophila X virus, Mosquito X virus, Rotifer birnavirus, Tellina virus 1, Euprosterna elaeasa virus, Thosea asigna virus, Botrytis porri botybirnavirus 1, Duck hepatitis B virus, Heron hepatitis B virus, Parrot hepatitis B virus, Tibetan frog hepatitis B virus, Blue gill hepatitis B virus, Capuchin monkey hepatitis B virus, Chinese shrew hepatitis B virus, Domestic cat hepatitis B virus, Ground squirrel hepatitis virus, Hepatitis B virus, Long-fingered bat hepatitis B virus, Pomona bat hepatitis B virus, Roundleaf bat hepatitis B virus, Tai Forest hepatitis B virus, Tent-making bat hepatitis B virus, Woodchuck hepatitis virus, Woolly monkey hepatitis B virus, White sucker hepatitis B virus, Anopheles gambiae Moose virus, Antheraea semotivirus Tamy, Ascaris lumbricoides Tas virus, Bombyx mori Pao virus, Caenorhabditis elegans Cer13 virus, Drosophila melanogaster Bel virus, Drosophila melanogaster Roo virus, Drosophila semotivirus Max, Drosophila simulans Ninja virus, Schistosoma semotivirus Sinbad, Takifugu rubripes Suzu virus, Aglaonema bacilliform virus, Banana streak GF virus, Banana streak IM virus, Banana streak MY virus, Banana streak OL virus, Banana streak UA virus, Banana streak UI virus, Banana streak UL virus, Banana streak UM virus, Banana streak VN virus, Birch leaf roll-associated virus, Blackberry virus F, Bougainvillea chlorotic vein banding virus, Cacao bacilliform Sri Lanka virus, Cacao mild mosaic virus, Cacao swollen shoot CD virus, Cacao swollen shoot CE virus, Cacao swollen shoot Ghana M virus, Cacao swollen shoot Ghana N virus, Cacao swollen shoot Ghana Q virus, Cacao swollen shoot Togo A virus, Cacao swollen shoot Togo B virus, Cacao yellow vein banding virus, Canna yellow mottle associated virus, Canna yellow mottle virus, Citrus yellow mosaic virus, Codonopsis vein clearing virus, Commelina yellow mottle virus, Dioscorea bacilliform AL virus, Dioscorea bacilliform AL virus 2, Dioscorea bacilliform ES virus, Dioscorea bacilliform RT virus 1, Dioscorea bacilliform RT virus 2, Dioscorea bacilliform SN virus, Dioscorea bacilliform TR virus, Fig badnavirus 1, Gooseberry vein banding associated virus, Grapevine badnavirus 1, Grapevine Roditis leaf discoloration-associated virus, Grapevine vein clearing virus, Jujube mosaic-associated virus, Kalanchoe top-spotting virus, Mulberry badnavirus 1, Pagoda yellow mosaic associated virus, Pineapple bacilliform CO virus, Pineapple bacilliform ER virus, Piper yellow mottle virus, Rubus yellow net virus, Schefflera ringspot virus, Spiraea yellow leafspot virus, Sugarcane bacilliform Guadeloupe A virus, Sugarcane bacilliform Guadeloupe D virus, Sugarcane bacilliform IM virus, Sugarcane bacilliform MO virus, Sweet potato pakakuy virus, Taro bacilliform CH virus, Taro bacilliform virus, Wisteria badnavirus 1, Yacon necrotic mottle virus, Angelica bushy stunt virus, Atractylodes mild mottle virus, Carnation etched ring virus, Cauliflower mosaic virus, Dahlia mosaic virus, Figwort mosaic virus, Horseradish latent virus, Lamium leaf distortion virus, Mirabilis mosaic virus, Rudbeckia flower distortion virus, Soybean Putnam virus, Strawberry vein banding virus, Thistle mottle virus, Cassava vein mosaic virus, Sweet potato collusive virus, Dioscorea nummularia associated virus, Petunia vein clearing virus, Rose yellow vein virus, Sweet potato vein clearing virus, Tobacco vein clearing virus, Blueberry red ringspot virus, Cestrum yellow leaf curling virus, Peanut chlorotic streak virus, Soybean chlorotic mottle virus, Rice tungro bacilliform virus, Blueberry fruit drop associated virus, Ceratitis capitata Yoyo virus, Drosophila ananassae Tom virus, Drosophila melanogaster 17-6 virus, Drosophila melanogaster 297 virus, Drosophila melanogaster Gypsy virus, Drosophila melanogaster Idefix virus, Drosophila melanogaster Tirant virus, Drosophila melanogaster Zam virus, Drosophila virilis Tvl virus, Trichoplusia ni TED virus, Arabidopsis thaliana Athila virus, Arabidopsis thaliana Tat4 virus, Bombyx mori Mag virus, Caenorhabditis elegans Cer1 virus, Cladosporium fulvum T-1 virus, Dictyostelium discoideum Skipper virus, Drosophila buzzatii Osvaldo virus, Drosophila melanogaster 412 virus, Drosophila melanogaster Blastopia virus, Drosophila melanogaster Mdg1 virus, Drosophila melanogaster Mdg3 virus, Drosophila melanogaster Micropia virus, Drosophila virilis Ulysses virus, Fusarium oxysporum Skippy virus, Lilium henryi Dell virus, Saccharomyces cerevisiae Ty3 virus, Schizosaccharomyces pombe Tf1 virus, Schizosaccharomyces pombe Tf2 virus, Takifugu rubripes Sushi virus, Tribolium castaneum Woot virus, Tripneustis gratilla SURL virus, Aedes aegypti Mosqcopia virus, Candida albicans Tca2 virus, Candida albicans Tca5 virus, Drosophila melanogaster 1731 virus, Drosophila melanogaster copia virus, Saccharomyces cerevisiae Ty5 virus, Volvox carteri Lueckenbuesser virus, Volvox carteri Osser virus, Arabidopsis thaliana Art1 virus, Arabidopsis thaliana AtRE1 virus, Arabidopsis thaliana evelknievel virus, Arabidopsis thaliana Tal virus, Brassica oleracea Melmoth virus, Cajanus cajan Panzee virus, Glycine max Tgmr virus, Hordeum vulgare BARE-1 virus, Nicotiana tabacum Tnt1 virus, Nicotiana tabacum Tto1 virus, Oryza australiensis RIRE1 virus, Oryza longistaminata Retrofit virus, Physarum polycephalum Tp1 virus, Saccharomyces cerevisiae Ty1 virus, Saccharomyces cerevisiae Ty2 virus, Saccharomyces cerevisiae Ty4 virus, Solanum tuberosum Tst1 virus, Triticum aestivum WIS2 virus, Zea mays Hopscotch virus, Zea mays Sto4 virus, Arabidopsis thaliana Endovir virus, Glycine max SIRE1 virus, Lycopersicon esculentum ToRTL1 virus, Zea mays Opie2 virus, Zea mays Prem2 virus, Phaseolus vulgaris Tpv2-6 virus, Avian carcinoma Mill Hill virus 2, Avian leukosis virus, Avian myeloblastosis virus, Avian myelocytomatosis virus 29, Avian sarcoma virus CT10, Fujinami sarcoma virus, Rous sarcoma virus, UR2 sarcoma virus, Y73 sarcoma virus, Jaagsiekte sheep retrovirus, Langur virus, Mason-Pfizer monkey virus, Mouse mammary tumor virus, Squirrel monkey retrovirus, Bovine leukemia virus, Primate T-lymphotropic virus 1, Primate T-lymphotropic virus 2, Primate T-lymphotropic virus 3, Walleye dermal sarcoma virus, Walleye epidermal hyperplasia virus 1, Walleye epidermal hyperplasia virus 2, Chick syncytial virus, Feline leukemia virus, Finkel-Biskis-Jinkins murine sarcoma virus, Gardner-Arnstein feline sarcoma virus, Gibbon ape leukemia virus, Guinea pig type-C oncovirus, Hardy-Zuckerman feline sarcoma virus, Harvey murine sarcoma virus, Kirsten murine sarcoma virus, Koala retrovirus, Moloney murine sarcoma virus, Murine leukemia virus, Porcine type-C oncovirus, Reticuloendotheliosis virus, Snyder-Theilen feline sarcoma virus, Trager duck spleen necrosis virus, Viper retrovirus, Woolly monkey sarcoma virus, Bovine immunodeficiency virus, Caprine arthritis encephalitis virus, Equine infectious anemia virus, Feline immunodeficiency virus, Human immunodeficiency virus 1, Human immunodeficiency virus 2, Jembrana disease virus, Puma lentivirus, Simian immunodeficiency virus, Visna-maedi virus, Bovine foamy virus, Equine foamy virus, Feline foamy virus, Brown greater galago prosimian foamy virus, Bornean orangutan simian foamy virus, Central chimpanzee simian foamy virus, Cynomolgus macaque simian foamy virus, Eastern chimpanzee simian foamy virus, Grivet simian foamy virus, Guenon simian foamy virus, Japanese macaque simian foamy virus, Rhesus macaque simian foamy virus, Spider monkey simian foamy virus, Squirrel monkey simian foamy virus, Taiwanese macaque simian foamy virus, Western chimpanzee simian foamy virus, Western lowland gorilla simian foamy virus, White-tufted-ear marmoset simian foamy virus, Yellow-breasted capuchin simian foamy virus, Aspergillus fumigatus polymycovirus 1, Aspergillus spelaeus polymycovirus 1, Beauveria bassiana polymycovirus 1, Botryoshaeria dothidea polymycovirus 1, Cladosporium cladosporioides polymycovirus 1, Colletotrichum camelliae polymycovirus 1, Fusarium redolens polymycovirus 1, Magnaporthe oryzae polymycovirus 1, Penicillium digitatum polymycovirus 1, Penicillum brevicompactum polymycovirus 1, Macrobrachium satellite virus 1, Tobacco albetovirus 1, Tobacco albetovirus 2, Tobacco albetovirus 3, Maize aumaivirus 1, Panicum papanivirus 1, Tobacco virtovirus 1, Acanthocystis turfacea chlorella virus 1, Hydra viridis Chlorella virus 1, Paramecium bursaria Chlorella virus 1, Paramecium bursaria Chlorella virus A1, Paramecium bursaria Chlorella virus ALIA, Paramecium bursaria Chlorella virus AL2A, Paramecium bursaria Chlorella virus BJ2C, Paramecium bursaria Chlorella virus CA4A, Paramecium bursaria Chlorella virus CA4B, Paramecium bursaria Chlorella virus IL3A, Paramecium bursaria Chlorella virus NC1A, Paramecium bursaria Chlorella virus NE8A, Paramecium bursaria Chlorella virus NY2A, Paramecium bursaria Chlorella virus NYs1, Paramecium bursaria Chlorella virus SC1A, Paramecium bursaria Chlorella virus XY6E, Paramecium bursaria Chlorella virus XZ3A, Paramecium bursaria Chlorella virus XZ4A, Paramecium bursaria Chlorella virus XZ4C, Emiliania huxleyi virus 86, Ectocarpus fasciculatus virus a, Ectocarpus siliculosus virus 1, Ectocarpus siliculosus virus a, Feldmannia irregularis virus a, Feldmannia species virus, Feldmannia species virus a, Hincksia hinckiae virus a, Myriotrichia clavaeformis virus a, Pilayella littoralis virus 1, Micromonas pusilla virus SP1, Ostreococcus tauri virus OtV5, Chrysochromulina brevifilum virus PW1, Heterosigma akashiwo virus 01, Cafeteria roenbergensis virus, Acanthamoeba polyphaga mimivirus, Heliothis virescens ascovirus 3a, Spodoptera frugiperda ascovirus 1a, Trichoplusia ni ascovirus 2a, Diadromus pulchellus toursvirus, Lymphocystis disease virus 1, Lymphocystis disease virus 2, Lymphocystis disease virus 3, Infectious spleen and kidney necrosis virus, Scale drop disease virus, Ambystoma tigrinum virus, Common midwife toad virus, Epizootic haematopoietic necrosis virus, Frog virus 3, Santee-Cooper ranavirus, Singapore grouper iridovirus, Anopheles minimus iridovirus, Invertebrate iridescent virus 3, Invertebrate iridescent virus 9, Invertebrate iridescent virus 22, Invertebrate iridescent virus 25, Decapod iridescent virus 1, Invertebrate iridescent virus 6, Invertebrate iridescent virus 31, Marseillevirus marseillevirus, Senegalvirus marseillevirus, Lausannevirus, Tunisvirus, African swine fever virus, Canarypox virus, Flamingopox virus, Fowlpox virus, Juncopox virus, Mynahpox virus, Penguinpox virus, Pigeonpox virus, Psittacinepox virus, Quailpox virus, Sparrowpox virus, Starlingpox virus, Turkeypox virus, Goatpox virus, Lumpy skin disease virus, Sheeppox virus, Murmansk microtuspox virus, Yokapox virus, Mule deerpox virus, Nile crocodilepox virus, Hare fibroma virus, Myxoma virus, Rabbit fibroma virus, Squirrel fibroma virus, Eastern kangaroopox virus, Western kangaroopox virus, Molluscum contagiosum virus, Sea otterpox virus, Abatino macacapox virus, Akhmeta virus, Camelpox virus, Cowpox virus, Ectromelia virus, Monkeypox virus, Raccoonpox virus, Skunkpox virus, Taterapox virus, Vaccinia virus, Variola virus, Volepox virus, Cotia virus, Bovine papular stomatitis virus, Grey sealpox virus, Orf virus, Pseudocowpox virus, Red deerpox virus, Pteropox virus, Salmon gillpox virus, Squirrelpox virus, Swinepox virus, Eptesipox virus, Tanapox virus, Yaba monkey tumor virus, Anomala cuprea entomopoxvirus, Aphodius tasmaniae entomopoxvirus, Demodema bonariensis entomopoxvirus, Dermolepida albohirtum entomopoxvirus, Figulus sublaevis entomopoxvirus, Geotrupes sylvaticus entomopoxvirus, Melolontha melolontha entomopoxvirus, Acrobasis zelleri entomopoxvirus, Adoxophyes honmai entomopoxvirus, Amsacta moorei entomopoxvirus, Arphia conspersa entomopoxvirus, Choristoneura biennis entomopoxvirus, Choristoneura conflicta entomopoxvirus, Choristoneura diversuma entomopoxvirus, Choristoneura fumiferana entomopoxvirus, Choristoneura rosaceana entomopoxvirus, Chorizagrotis auxiliaris entomopoxvirus, Heliothis armigera entomopoxvirus, Locusta migratoria entomopoxvirus, Mythimna separata entomopoxvirus, Oedaleus senegalensis entomopoxvirus, Operophtera brumata entomopoxvirus, Schistocerca gregaria entomopoxvirus, Melanoplus sanguinipes entomopoxvirus, Aedes aegypti entomopoxvirus, Camptochironomus tentans entomopoxvirus, Chironomus attenuatus entomopoxvirus, Chironomus luridus entomopoxvirus, Chironomus plumosus entomopoxvirus, Goeldichironomus holoprasinus entomopoxvirus, Diachasmimorpha entomopoxvirus, Cafeteriavirus-dependent mavirus, Mimivirus-dependent virus Sputnik, Mimivirus-dependent virus Zamilon, Sulfolobus turreted icosahedral virus 1, Sulfolobus turreted icosahedral virus 2, Pseudomonas virus PR4, Pseudomonas virus PRD1, Bacillus virus AP50, Bacillus virus Bam35, Bacillus virus GIL16, Bacillus virus Wip1, Gluconobacter virus GC1, Bovine atadenovirus D, Deer atadenovirus A, Duck atadenovirus A, Lizard atadenovirus A, Ovine atadenovirus D, Possum atadenovirus A, Psittacine atadenovirus A, Snake atadenovirus A, Duck aviadenovirus B, Falcon aviadenovirus A, Fowl aviadenovirus A, Fowl aviadenovirus B, Fowl aviadenovirus C, Fowl aviadenovirus D, Fowl aviadenovirus E, Goose aviadenovirus A, Pigeon aviadenovirus A, Pigeon aviadenovirus B, Psittacine aviadenovirus B, Psittacine aviadenovirus C, Turkey aviadenovirus B, Turkey aviadenovirus C, Turkey aviadenovirus D, Sturgeon ichtadenovirus A, Bat mastadenovirus A, Bat mastadenovirus B, Bat mastadenovirus C, Bat mastadenovirus D, Bat mastadenovirus E, Bat mastadenovirus F, Bat mastadenovirus G, Bat mastadenovirus H, Bat mastadenovirus I, Bat mastadenovirus J, Bovine mastadenovirus A, Bovine mastadenovirus B, Bovine mastadenovirus C, Canine mastadenovirus A, Deer mastadenovirus B, Dolphin mastadenovirus A, Dolphin mastadenovirus B, Equine mastadenovirus A, Equine mastadenovirus B, Human mastadenovirus A, Human mastadenovirus B, Human mastadenovirus C, Human mastadenovirus D, Human mastadenovirus E, Human mastadenovirus F, Human mastadenovirus G, Murine mastadenovirus A, Murine mastadenovirus B, Murine mastadenovirus C, Ovine mastadenovirus A, Ovine mastadenovirus B, Ovine mastadenovirus C, Platyrrhini mastadenovirus A, Polar bear mastadenovirus A, Porcine mastadenovirus A, Porcine mastadenovirus B, Porcine mastadenovirus C, Sea lion mastadenovirus A, Simian mastadenovirus A, Simian mastadenovirus B, Simian mastadenovirus C, Simian mastadenovirus D, Simian mastadenovirus E, Simian mastadenovirus F, Simian mastadenovirus G, Simian mastadenovirus H, Simian mastadenovirus I, Skunk mastadenovirus A, Squirrel mastadenovirus A, Tree shrew mastadenovirus A, Frog siadenovirus A, Great tit siadenovirus A, Penguin siadenovirus A, Raptor siadenovirus A, Skua siadenovirus A, Turkey siadenovirus A, Pseudoalteromonas virus Cr39582, Pseudoalteromonas virus PM2, Haloarcula hispanica icosahedral virus 2, Haloarcula hispanica virus PH1, Haloarcula hispanica virus SH1, Haloarcula virus HCIV1, Natrinema virus SNJ1, Thermus virus IN93, Thermus virus P23-77, Alphalipothrixvirus SBFV2, Alphalipothrixvirus SFV1, Acidianus filamentous virus 3, Acidianus filamentous virus 6, Acidianus filamentous virus 7, Acidianus filamentous virus 8, Acidianus filamentous virus 9, Sulfolobus islandicus filamentous virus, Acidianus filamentous virus 2, Deltalipothrixvirus SBFV3, Acidianus filamentous virus 1, Acidianus rod-shaped virus 1, Sulfolobus islandicus rod-shaped virus 1, Sulfolobus islandicus rod-shaped virus 2, Ageratum yellow vein Singapore alphasatellite, Cotton leaf curl Saudi Arabia alphasatellite, Ash gourd yellow vein mosaic alphasatellite, Capsicum India alphasatellite, Cleome leaf crumple alphasatellite, Croton yellow vein mosaic alphasatellite, Euphorbia yellow mosaic alphasatellite, Melon chlorotic mosaic alphasatellite, Sida Cuba alphasatellite, Tomato leaf curl New Delhi alphasatellite, Tomato leaf curl Virudhunagar alphasatellite, Tomato yellow spot alphasatellite, Whitefly associated Guatemala alphasatellite 2, Whitefly associated Puerto Rico alphasatellite 1, Ageratum enation alphasatellite, Ageratum yellow vein alphasatellite, Ageratum yellow vein China alphasatellite, Ageratum yellow vein India alphasatellite, Bhendi yellow vein alphasatellite, Cassava mosaic Madagascar alphasatellite, Chilli leaf curl alphasatellite, Cotton leaf curl Egypt alphasatellite, Cotton leaf curl Gezira alphasatellite, Cotton leaf curl Lucknow alphasatellite, Cotton leaf curl Multan alphasatellite, Gossypium darwinii symptomless alphasatellite, Malvastrum yellow mosaic alphasatellite, Malvastrum yellow mosaic Cameroon alphasatellite, Pedilanthus leaf curl alphasatellite, Sida leaf curl alphasatellite, Sida yellow vein Vietnam alphasatellite, Sunflower leaf curl Karnataka alphasatellite, Synedrella leaf curl alphasatellite, Tobacco curly shoot alphasatellite, Tomato leaf curl Buea alphasatellite, Tomato leaf curl Cameroon alphasatellite, Tomato leaf curl Pakistan alphasatellite, Tomato yellow leaf curl China alphasatellite, Tomato yellow leaf curl Thailand alphasatellite, Tomato yellow leaf curl Yunnan alphasatellite, Eclipta yellow vein alphasatellite, Gossypium mustelinum symptomless alphasatellite, Hollyhock yellow vein alphasatellite, Mesta yellow vein mosaic alphasatellite, Okra enation leaf curl alphasatellite, Okra yellow crinkle Cameroon alphasatellite, Vernonia yellow vein Fujian alphasatellite, Dragonfly associated alphasatellite, Whitefly associated Guatemala alphasatellite 1, Banana bunchy top alphasatellite 1, Banana bunchy top alphasatellite 2, Banana bunchy top alphasatellite 3, Cardamom bushy dwarf alphasatellite, Milk vetch dwarf alphasatellite 2, Pea necrotic yellow dwarf alphasatellite 2, Sophora yellow stunt alphasatellite 4, Sophora yellow stunt alphasatellite 5, Subterranean clover stunt alphasatellite 2, Faba bean necrotic yellows alphasatellite 2, Milk vetch dwarf alphasatellite 3, Faba bean necrotic stunt alphasatellite, Milk vetch dwarf alphasatellite 1, Pea necrotic yellow dwarf alphasatellite 1, Sophora yellow stunt alphasatellite 2, Cow vetch latent alphasatellite, Sophora yellow stunt alphasatellite 3, Faba bean necrotic yellows alphasatellite 1, Faba bean necrotic yellows alphasatellite 3, Sophora yellow stunt alphasatellite 1, Subterranean clover stunt alphasatellite 1, Coconut foliar decay alphasatellite, Acidianus bottle-shaped virus, Torque teno virus 1, Torque teno virus 2, Torque teno virus 3, Torque teno virus 4, Torque teno virus 5, Torque teno virus 6, Torque teno virus 7, Torque teno virus 8, Torque teno virus 9, Torque teno virus 10, Torque teno virus 11, Torque teno virus 12, Torque teno virus 13, Torque teno virus 14, Torque teno virus 15, Torque teno virus 16, Torque teno virus 17, Torque teno virus 18, Torque teno virus 19, Torque teno virus 20, Torque teno virus 21, Torque teno virus 22, Torque teno virus 23, Torque teno virus 24, Torque teno virus 25, Torque teno virus 26, Torque teno virus 27, Torque teno virus 28, Torque teno virus 29, Torque teno mini virus 1, Torque teno mini virus 2, Torque teno mini virus 3, Torque teno mini virus 4, Torque teno mini virus 5, Torque teno mini virus 6, Torque teno mini virus 7, Torque teno mini virus 8, Torque teno mini virus 9, Torque teno mini virus 10, Torque teno mini virus 11, Torque teno mini virus 12, Torque teno tupaia virus, Torque teno tamarin virus, Torque teno felis virus, Torque teno felis virus 2, Torque teno midi virus 1, Torque teno midi virus 2, Torque teno midi virus 3, Torque teno midi virus 4, Torque teno midi virus 5, Torque teno midi virus 6, Torque teno midi virus 7, Torque teno midi virus 8, Torque teno midi virus 9, Torque teno midi virus 10, Torque teno midi virus 11, Torque teno midi virus 12, Torque teno midi virus 13, Torque teno midi virus 14, Torque teno midi virus 15, Chicken anemia virus, Torque teno sus virus 1a, Torque teno sus virus 1b, Torque teno sus virus k2a, Torque teno sus virus k2b, Torque teno seal virus 1, Torque teno seal virus 2, Torque teno seal virus 3, Torque teno seal virus 8, Torque teno seal virus 9, Torque teno zalophus virus 1, Torque teno equus virus 1, Torque teno seal virus 4, Torque teno seal virus 5, Torque teno canis virus, Torque teno douroucouli virus, Avocado sunblotch viroid, Eggplant latent viroid, Apple hammerhead viroid, Chrysanthemum chlorotic mottle viroid, Peach latent mosaic viroid, Adoxophyes honmai nucleopolyhedrovirus, Agrotis ipsilon multiple nucleopolyhedrovirus, Agrotis segetum nucleopolyhedrovirus A, Agrotis segetum nucleopolyhedrovirus B, Antheraea pernyi nucleopolyhedrovirus, Anticarsia gemmatalis multiple nucleopolyhedrovirus, Autographa californica multiple nucleopolyhedrovirus, Bombyx mori nucleopolyhedrovirus, Buzura suppressaria nucleopolyhedrovirus, Catopsilia pomona nucleopolyhedrovirus, Choristoneura fumiferana DEF multiple nucleopolyhedrovirus, Choristoneura fumiferana multiple nucleopolyhedrovirus, Choristoneura murinana nucleopolyhedrovirus, Choristoneura rosaceana nucleopolyhedrovirus, Chrysodeixis chalcites nucleopolyhedrovirus, Chrysodeixis includens nucleopolyhedrovirus, Clanis bilineata nucleopolyhedrovirus, Condylorrhiza vestigialis nucleopolyhedrovirus, Cryptophlebia peltastica nucleopolyhedrovirus, Cyclophragma undans nucleopolyhedrovirus, Ectropis obliqua nucleopolyhedrovirus, Epiphyas postvittana nucleopolyhedrovirus, Euproctis pseudoconspersa nucleopolyhedrovirus, Helicoverpa armigera nucleopolyhedrovirus, Hemileuca species nucleopolyhedrovirus, Hyphantria cunea nucleopolyhedrovirus, Hyposidra talaca nucleopolyhedrovirus, Lambdina fiscellaria nucleopolyhedrovirus, Leucania separata nucleopolyhedrovirus, Lonomia obliqua nucleopolyhedrovirus, Lymantria dispar multiple nucleopolyhedrovirus, Lymantria xylina nucleopolyhedrovirus, Mamestra brassicae multiple nucleopolyhedrovirus, Mamestra configurata nucleopolyhedrovirus A, Mamestra configurata nucleopolyhedrovirus B, Maruca vitrata nucleopolyhedrovirus, Mythimna unipuncta nucleopolyhedrovirus A, Mythimna unipuncta nucleopolyhedrovirus B, Operophtera brumata nucleopolyhedrovirus, Orgyia leucostigma nucleopolyhedrovirus, Orgyia pseudotsugata multiple nucleopolyhedrovirus, Oxyplax ochracea nucleopolyhedrovirus, Peridroma saucia nucleopolyhedrovirus, Perigonia lusca nucleopolyhedrovirus, Spodoptera eridania nucleopolyhedrovirus, Spodoptera exempta nucleopolyhedrovirus, Spodoptera exigua multiple nucleopolyhedrovirus, Spodoptera frugiperda multiple nucleopolyhedrovirus, Spodoptera littoralis nucleopolyhedrovirus, Spodoptera litura nucleopolyhedrovirus, Sucra jujuba nucleopolyhedrovirus, Thysanoplusia orichalcea nucleopolyhedrovirus, Trichoplusia ni single nucleopolyhedrovirus, Urbanus proteus nucleopolyhedrovirus, Wiseana signata nucleopolyhedrovirus, Adoxophyes orana granulovirus, Agrotis segetum granulovirus, Artogeia rapae granulovirus, Choristoneura fumiferana granulovirus, Clostera anachoreta granulovirus, Clostera anastomosis granulovirus A, Clostera anastomosis granulovirus B, Cnaphalocrocis medinalis granulovirus, Cryptophlebia leucotreta granulovirus, Cydia pomonella granulovirus, Diatraea saccharalis granulovirus, Epinotia aporema granulovirus, Erinnyis ello granulovirus, Harrisina brillians granulovirus, Helicoverpa armigera granulovirus, Lacanobia oleracea granulovirus, Mocis latipes granulovirus, Mythimna unipuncta granulovirus A, Mythimna unipuncta granulovirus B, Phthorimaea operculella granulovirus, Plodia interpunctella granulovirus, Plutella xylostella granulovirus, Spodoptera frugiperda granulovirus, Spodoptera litura granulovirus, Trichoplusia ni granulovirus, Xestia c-nigrum granulovirus, Culex nigripalpus nucleopolyhedrovirus, Neodiprion lecontei nucleopolyhedrovirus, Neodiprion sertifer nucleopolyhedrovirus, Acidianus two-tailed virus, Aeropyrum pernix bacilliform virus 1, Flavobacterium virus FLiP, Sulfolobus spindle-shaped virus 1, Sulfolobus spindle-shaped virus 2, Sulfolobus spindle-shaped virus 4, Sulfolobus spindle-shaped virus 5, Sulfolobus spindle-shaped virus 7, Sulfolobus spindle-shaped virus 8, Sulfolobus spindle-shaped virus 9, Acidianus spindle-shaped virus 1, Sulfolobus spindle-shaped virus 6, Pyrobaculum spherical virus, Thermoproteus tenax spherical virus 1, Sulfolobus newzealandicus droplet-shaped virus, Aeropyrum pernix ovoid virus 1, Salterprovirus His1, Glossina hytrosavirus, Musca hytrosavirus, White spot syndrome virus, Gryllus bimaculatus nudivirus, Oryctes rhinoceros nudivirus, Heliothis zea nudivirus, Sulfolobus ellipsoid virus 1, Acholeplasma virus L2, Apanteles crassicornis bracovirus, Apanteles fumiferanae bracovirus, Ascogaster argentifrons bracovirus, Ascogaster quadridentata bracovirus, Cardiochiles nigriceps bracovirus, Chelonus altitudinis bracovirus, Chelonus blackburni bracovirus, Chelonus inanitus bracovirus, Chelonus insularis bracovirus, Chelonus near curvimaculatus bracovirus, Chelonus texanus bracovirus, Cotesia congregata bracovirus, Cotesia flavipes bracovirus, Cotesia glomerata bracovirus, Cotesia hyphantriae bracovirus, Cotesia kariyai bracovirus, Cotesia marginiventris bracovirus, Cotesia melanoscela bracovirus, Cotesia rubecula bracovirus, Cotesia schaeferi bracovirus, Diolcogaster facetosa bracovirus, Glyptapanteles flavicoxis bracovirus, Glyptapanteles indiensis bracovirus, Glyptapanteles liparidis bracovirus, Hypomicrogaster canadensis bracovirus, Hypomicrogaster ectdytolophae bracovirus, Microplitis croceipes bracovirus, Microplitis demolitor bracovirus, Phanerotoma flavitestacea bracovirus, Pholetesor ornigis bracovirus, Protapanteles paleacritae bracovirus, Tranosema rostrale bracovirus, Campoletis aprilis ichnovirus, Campoletis flavicincta ichnovirus, Campoletis sonorensis ichnovirus, Casinaria arjuna ichnovirus, Casinaria forcipata ichnovirus, Casinaria infesta ichnovirus, Diadegma acronyctae ichnovirus, Diadegma interruptum ichnovirus, Diadegma terebrans ichnovirus, Enytus montanus ichnovirus, Eriborus terebrans ichnovirus, Glypta fumiferanae ichnovirus, Hyposoter annulipes ichnovirus, Hyposoter exiguae ichnovirus, Hyposoter fugitivus ichnovirus, Hyposoter lymantriae ichnovirus, Hyposoter pilosulus ichnovirus, Hyposoter rivalis ichnovirus, Olesicampe benefactor ichnovirus, Olesicampe geniculatae ichnovirus, Synetaeris tenuifemur ichnovirus, Alphaportoglobovirus SPV2, Sulfolobus alphaportoglobovirus 1, Apple dimple fruit viroid, Apple scar skin viroid, Australian grapevine viroid, Citrus bent leaf viroid, Citrus dwarfing viroid, Citrus viroid V, Citrus viroid VI, Grapevine yellow speckle viroid 1, Grapevine yellow speckle viroid 2, Pear blister canker viroid, Citrus bark cracking viroid, Coconut cadang-cadang viroid, Coconut tinangaja viroid, Hop latent viroid, Coleus blumei viroid 1, Coleus blumei viroid 2, Coleus blumei viroid 3, Dahlia latent viroid, Hop stunt viroid, Chrysanthemum stunt viroid, Citrus exocortis viroid, Columnea latent viroid, Iresine viroid 1, Pepper chat fruit viroid, Potato spindle tuber viroid, Tomato apical stunt viroid, Tomato chlorotic dwarf viroid, Tomato planta macho viroid, Aeropyrum coil-shaped virus, Nitmarvirus NSV1, Ageratum leaf curl Buea betasatellite, Ageratum leaf curl Cameroon betasatellite, Ageratum yellow leaf curl betasatellite, Ageratum yellow vein betasatellite, Ageratum yellow vein India betasatellite, Ageratum yellow vein Sri Lanka betasatellite, Alternanthera yellow vein betasatellite, Andrographis yellow vein leaf curl betasatellite, Bhendi yellow vein mosaic betasatellite, Cardiospermum yellow leaf curl betasatellite, Chili leaf curl betasatellite, Chili leaf curl Jaunpur betasatellite, Chili leaf curl Sri Lanka betasatellite, Cotton leaf curl Gezira betasatellite, Cotton leaf curl Multan betasatellite, Croton yellow vein mosaic betasatellite, Eupatorium yellow vein betasatellite, Eupatorium yellow vein mosaic betasatellite, French bean leaf curl betasatellite, Hedyotis yellow mosaic betasatellite, Honeysuckle yellow vein betasatellite, Honeysuckle yellow vein mosaic betasatellite, Malvastrum leaf curl betasatellite, Malvastrum leaf curl Guangdong betasatellite, Mirabilis leaf curl betasatellite, Momordica yellow mosaic betasatellite, Mungbean yellow mosaic betasatellite, Okra leaf curl Oman betasatellite, Papaya leaf curl betasatellite, Papaya leaf curl China betasatellite, Papaya leaf curl India betasatellite, Rhynchosia yellow mosaic betasatellite, Rose leaf curl betasatellite, Siegesbeckia yellow vein betasatellite, Tobacco curly shoot betasatellite, Tobacco leaf curl betasatellite, Tobacco leaf curl Japan betasatellite, Tobacco leaf curl Patna betasatellite, Tomato leaf curl Bangalore betasatellite, Tomato leaf curl Bangladesh betasatellite, Tomato leaf curl betasatellite, Tomato leaf curl China betasatellite, Tomato leaf curl Gandhinagar betasatellite, Tomato leaf curl Java betasatellite, Tomato leaf curl Joydebpur betasatellite, Tomato leaf curl Laguna betasatellite, Tomato leaf curl Laos betasatellite, Tomato leaf curl Malaysia betasatellite, Tomato leaf curl Nepal betasatellite, Tomato leaf curl Patna betasatellite, Tomato leaf curl Philippine betasatellite, Tomato leaf curl Sri Lanka betasatellite, Tomato leaf curl Yemen betasatellite, Tomato yellow leaf curl China betasatellite, Tomato yellow leaf curl Rajasthan betasatellite, Tomato yellow leaf curl Shandong betasatellite, Tomato yellow leaf curl Thailand betasatellite, Tomato yellow leaf curl Vietnam betasatellite, Tomato yellow leaf curl Yunnan betasatellite, Vernonia yellow vein betasatellite, Vernonia yellow vein Fujian betasatellite, Croton yellow vein deltasatellite, Malvastrum leaf curl deltasatellite, Sida golden yellow vein deltasatellite 1, Sida golden yellow vein deltasatellite 2, Sida golden yellow vein deltasatellite 3, Sweet potato leaf curl deltasatellite 1, Sweet potato leaf curl deltasatellite 2, Sweet potato leaf curl deltasatellite 3, Tomato leaf curl deltasatellite, Tomato yellow leaf distortion deltasatellite 1, Tomato yellow leaf distortion deltasatellite 2, Pyrobaculum filamentous virus 1, Thermoproteus tenax virus 1, Hepatitis delta virus, Heterocapsa circularisquama DNA virus 01, and Rhizidiomyces virus. Other viruses include the ICTV Master species list (https://talk.ietvonline.org/files/master-species-lists/m/msl/9601), which is incorporated by reference herein.

[0355] In one embodiment, the virus is a coronoavirus. In one embodiment, the virus is SARS-CoV-2. In one embodiment, the virus in an influenza virus. In one embodiment, In one embodiment, the virus in an influenza A virus, an influenza B virus, an influenza C virus, or an influenza D virus.

### Amino Acid and Nucleic Acid Sequences

[0356] Table 1 provides a summary of the amino acid and nucleic acid sequences.

TABLE 1

| SEQ ID | | |
|---|---|---|
| NO | Type | Description |
| 1 | Amino Acid | PspCas13b |
| 2 | Amino Acid | PspCas13b Truncation |
| 3 | Amino Acid | AspCas13b |
| 4 | Amino Acid | AspCas13c |
| 5 | Amino Acid | BmaCas13a |
| 6 | Amino Acid | BzoCas13b |
| 7 | Amino Acid | CamCas13a |
| 8 | Amino Acid | CcaCas13b |
| 9 | Amino Acid | Cga2Cas13a |
| 10 | Amino Acid | CgaCas13a |
| 11 | Amino Acid | EbaCas13a |
| 12 | Amino Acid | EreCas13a |
| 13 | Amino Acid | EsCas13d |
| 14 | Amino Acid | FbrCas13b |
| 15 | Amino Acid | FnbCas13c |
| 16 | Amino Acid | FndCas13c |
| 17 | Amino Acid | FnfCas13c |
| 18 | Amino Acid | FnsCas13c |
| 19 | Amino Acid | FpeCas13c |
| 20 | Amino Acid | FulCas13c |
| 21 | Amino Acid | HheCas13a |
| 22 | Amino Acid | LbfCas13a |
| 23 | Amino Acid | LbmCas13a |
| 24 | Amino Acid | LbnCas13a |
| 25 | Amino Acid | LbuCas13a |
| 26 | Amino Acid | LseCas13a |
| 27 | Amino Acid | LshCas13a |
| 28 | Amino Acid | LspCas13a |
| 29 | Amino Acid | Lwa2cas13a |
| 30 | Amino Acid | LwaCas13a |
| 31 | Amino Acid | LweCas13a |
| 32 | Amino Acid | PauCas13b |
| 33 | Amino Acid | PbuCas13b |
| 34 | Amino Acid | PgiCas13b |
| 35 | Amino Acid | PguCas13b |
| 36 | Amino Acid | Pin2Cas13b |
| 37 | Amino Acid | Pin3Cas13b |
| 38 | Amino Acid | PinCas13b |
| 39 | Amino Acid | Pprcas13a |
| 40 | Amino Acid | PsaCas13b |
| 41 | Amino Acid | PsmCas13b |
| 42 | Amino Acid | RanCas13b |
| 43 | Amino Acid | RcdCas13a |
| 44 | Amino Acid | RcrCas13a |
| 45 | Amino Acid | RcsCas13a |
| 46 | Amino Acid | UrCas13d |
| 47 | Amino Acid | RfxCas13d |
| 48 | Amino Acid | dPspCas13b |
| 49 | Amino Acid | dPspCas13b truncation |
| 50 | Amino Acid | Ty1 NLS |
| 51 | Amino Acid | Ty2 NLS |
| 52 | Amino Acid | MAK11 |
| 53 | Amino Acid | 1xSV40 |
| 54 | Amino Acid | 3xSV40 |
| 55 | Amino Acid | NPM |
| 56 | Amino Acid | STH1 |
| 57 | Amino Acid | INO4 |
| 58 | Amino Acid | Nuclear Export Signal (NES) |
| 59 | Amino Acid | Nuclear Export Signal (NES) |
| 60 | Amino Acid | N-terminal 1x Mitochondrial Targeting Sequence |
| 61 | Amino Acid | N-terminal 4x Mitochondrial Targeting Sequence |
| 62 | Amino Acid | N-terminal Secretory Signal Sequence (IL-2) |
| 63 | Amino Acid | N-terminal Myristoylation (Membrane Targeting Sequence) |
| 64 | Amino Acid | ER Localization-N-terminal Calsequestrin leader sequence |
| 65 | Amino Acid | ER Localization-C-terminal KDEL retention signal |
| 66 | Amino Acid | C-terminal Peroxisome Targeting Sequence |
| 67 | Amino Acid | 3xFlag |
| 68 | Amino Acid | EraseR |
| 69 | Amino Acid | EraseR (Ty2) |
| 70 | Amino Acid | EraseR (NES) |
| 71 | Amino Acid | EraseR (NES) |
| 72 | Amino Acid | EraseR (N-terminal 1x Mitochondrial Targeting Sequence) |
| 73 | Amino Acid | EraseR (N-terminal 4x Mitochondrial Targeting Sequence) |
| 74 | Amino Acid | EraseR (N-terminal Secretory Signal Sequence (IL-2)) |
| 75 | Amino Acid | EraseR (N-terminal Myristoylation (Membrane Targeting Sequence)) |
| 76 | Amino Acid | EraseR (ER Localization-N-terminal Calsequestrin leader sequence) |
| 77 | Amino Acid | EraseR (ER Localization-C-terminal KDEL retention signal) |
| 78 | Amino Acid | EraseR (C-terminal Peroxisome Targeting Sequence) |
| 79 | Amino Acid | EraseR-Short |
| 80 | Amino Acid | EraseR (Ty2)-Short |
| 81 | Amino Acid | EraseR (NES)-Short |
| 82 | Amino Acid | EraseR (NES)-Short |
| 83 | Amino Acid | EraseR (N-terminal 1x Mitochondrial Targeting Sequence)-Short |
| 84 | Amino Acid | EraseR (N-terminal 4x Mitochondrial Targeting Sequence)-Short |
| 85 | Amino Acid | EraseR (N-terminal Secretory Signal Sequence (IL-2))-Short |
| 86 | Amino Acid | EraseR (N-terminal Myristoylation (Membrane Targeting Sequence))-Short |
| 87 | Amino Acid | EraseR (ER Localization-N-terminal Calsequestrin leader sequence)-Short |
| 88 | Amino Acid | EraseR (ER Localization-C-terminal KDEL retention signal)-Short |
| 89 | Amino Acid | EraseR (C-terminal Peroxisome Targeting Sequence)-Short |
| 90 | Amino Acid | RfxCas13d Eraser (Ty 1) |
| 91 | Amino Acid | RfxCas13d EraseR (Ty2) |
| 92 | Amino Acid | RfxCas13d EraseR (NES) |
| 93 | Amino Acid | RfxCas13d EraseR (NES) |
| 94 | Amino Acid | RfxCas13d EraseR (N-terminal 1x Mitochondrial Targeting Sequence) |
| 95 | Amino Acid | RfxCas13d EraseR (N-terminal 4x Mitochondrial Targeting Sequence) |
| 96 | Amino Acid | RfxCas13d EraseR (N-terminal Secretory Signal Sequence (IL-2)) |
| 97 | Amino Acid | RfxCas13d EraseR (N-terminal Myristoylation (Membrane Targeting |
| | | Sequence)) |
| 98 | Amino Acid | RfxCas13d EraseR (ER Localization-N-terminal Calsequestrin leader |
| | | sequence) |
| 99 | Amino Acid | RfxCas13d EraseR (ER Localization-C-terminal KDEL retention signal) |
| 100 | Amino Acid | RfxCas13d EraseR (C-terminal Peroxisome Targeting Sequence) |
| 101 | Amino Acid | SARS-CoV-2 Spike Protein Wild Type sequence |
| 102 | Amino Acid | SARS-CoV-2 Spike Protein with C-terminal 27 aa deletion) |
| 103 | Amino Acid | SARS-CoV-2 Spike Protein with HIV envelope membrane proximal sequence |
| | | (S-H2) |
| 104 | Amino Acid | SARS-CoV-2 Spike Protein with VSV-G envelope protein cytoplasmic tail |
| | | sequence |
| 105 | Amino Acid | SARS-CoV-2 Spike Protein with HIV envelope protein cytoplasmic tail |
| 106 | Amino Acid | SARS-CoV-2 Spike Protein with HIV transmembrane and cytoplasmic tail |
| 107 | Amino Acid | SARS-CoV-2 Spike Protein with VSV-G transmembrane and cytoplasmic tail |
| | | sequence |
| 108 | Amino Acid | SARS-CoV-1 Spike Protein (WT) |
| 109 | Amino Acid | SARS-CoV-1 Spike Protein N-term SP(CD5) and C-term truncation (aka |
| | | SARS-CoV-1 4LV) |
| 110 | Amino Acid | SARS-CoV-1 Spike Protein N-term SP(CD5) and VSV-G transmembrane and |
| | | cytoplasmic tail |
| 111 | Amino Acid | SARS-CoV-2 Spike Protein N-term SP(CD5) and C-term truncation (aka |
| | | SARS-CoV-2 4LV) |
| 112 | Amino Acid | SARS-CoV-2 Spike Protein N-term SP(CD5) and VSV-G transmembrane and |
| | | cytoplasmic tail |
| 113 | Amino Acid | SARS-CoV-2 Spike Protein [N501Y] |
| 114 | Amino Acid | SARS-CoV-2 Spike Protein N-term SP(CD5) and C-term truncation (aka |
| | | SARS-CoV-2 4LV) [N501Y] |
| 115 | Amino Acid | SARS-CoV-2 Spike Protein [D614G] |
| 116 | Amino Acid | SARS-CoV-2 Spike Protein N-term SP(CD5) and C-term truncation (aka |
| | | SARS-CoV-2 4LV) [D614G] |
| 117 | Amino Acid | SARS-CoV-2 Spike Protein [L452R] |
| 118 | Amino Acid | SARS-CoV-2 Spike Protein N-term SP(CD5) and C-term truncation (aka |
| | | SARS-CoV-2 4LV) [L452R] |
| 119 | Amino Acid | SARS-CoV-2 Spike Protein [E484K] |
| 120 | Amino Acid | SARS-CoV-2 Spike Protein N-term SP(CD5) and C-term truncation (aka |
| | | SARS-CoV-2 4LV) [E484K] |
| 121 | Amino Acid | SARS-CoV-2 Spike Protein [N501Y ; E484K] |
| 122 | Amino Acid | SARS-CoV-2 Spike Protein N-term SP(CD5) and C-term truncation (aka |
| | | SARS-CoV-2 4LV) [N501Y ; E484K] |
| 123 | Amino Acid | SARS-CoV-2 Spike Protein [P.1 lineage variant: K417N; E484K; N501Y] |
| 124 | Amino Acid | SARS-CoV-2 Spike Protein N-term SP(CD5) and C-term truncation (aka |
| | | SARS-CoV-2 4LV) [P.1 lineage variant: K417N; E484K; N501Y] |
| 125 | Amino Acid | SARS-CoV-2 Spike Protein [B.1.351 variant: K417N; E484K; N501Y; |
| | | D614G] |
| 126 | Amino Acid | SARS-CoV-2 Spike Protein N-term SP(CD5) and C-term truncation (aka |
| | | SARS-CoV-2 4LV) [B.1.351 variant: K417N; E484K; N501Y; D614G] |
| 127 | Amino Acid | SARS-CoV-2 Spike Protein N-term SP(CD5) and C-term truncation (aka |
| | | SARS-CoV-2 4LV) with GCN4 Trimerization domain |
| 128 | Amino Acid | SARS-CoV-2 Spike Protein N-term SP(CD5) and C-term truncation (aka |
| | | SARS-CoV-2 4LV) with T4 Foldon Trimerization domain |
| 129 | Amino Acid | SARS-CoV-2 Spike Protein N-term SP(CD5) and C-term truncation (aka |
| | | SARS-CoV-2 4LV) with mimimal T4 Foldon Trimerization domain |
| 130 | Amino Acid | VSV-G envelope protein for broad cell type transduction |
| 131 | Amino Acid | High Sensitivity Luciferase Expression Cassette Contains protein degradation |
| | | sequence (hC11-pest fusion) at C-terminus |
| 132 | Nucleic Acid | PspCas13b |
| 133 | Nucleic Acid | PspCas13b Truncation |
| 134 | Nucleic Acid | dPspCas13b |
| 135 | Nucleic Acid | dPspCas13b truncation |
| 136 | Nucleic Acid | Ty1NLS |
| 137 | Nucleic Acid | NES |
| 138 | Nucleic Acid | Nuclear Export Signal (NES) |
| 139 | Nucleic Acid | N-terminal 1x Mitochondrial Targeting Sequence |
| 140 | Nucleic Acid | N-terminal 4x Mitochondrial Targeting Sequence |
| 141 | Nucleic Acid | N-terminal Secretory Signal Sequence (IL-2) |
| 142 | Nucleic Acid | N-terminal Myristoylation (Membrane Targeting Sequence) |
| 143 | Nucleic Acid | ER Localization-N-terminal Calsequestrin leader sequence |
| 144 | Nucleic Acid | ER Localization-C-terminal KDEL retention signal |
| 145 | Nucleic Acid | C-terminal Peroxisome Targeting Sequence |
| 146 | Nucleic Acid | 3xFlag |
| 147 | Nucleic Acid | EraseR (Ty1) |
| 148 | Nucleic Acid | EraseR (NES) |
| 149 | Nucleic Acid | EraseR (NES) |
| 150 | Nucleic Acid | EraseR (N-terminal 1x Mitochondrial Targeting Sequence) |
| 151 | Nucleic Acid | EraseR (N-terminal 4x Mitochondrial Targeting Sequence) |
| 152 | Nucleic Acid | EraseR (N-terminal Secretory Signal Sequence (IL-2)) |
| 153 | Nucleic Acid | EraseR (N-terminal Myristoylation (Membrane Targeting Sequence)) |
| 154 | Nucleic Acid | EraseR (ER Localization-N-terminal Calsequestrin leader sequence) |
| 155 | Nucleic Acid | EraseR (ER Localization-C-terminal KDEL retention signal) |
| 156 | Nucleic Acid | EraseR (C-terminal Peroxisome Targeting Sequence) |
| 157 | Nucleic Acid | EraseR (Ty1)-short |
| 158 | Nucleic Acid | EraseR (NES)-short |
| 159 | Nucleic Acid | EraseR (NES)-short |
| 160 | Nucleic Acid | EraseR (N-terminal 1x Mitochondrial Targeting Sequence)-short |
| 161 | Nucleic Acid | EraseR (N-terminal 4x Mitochondrial Targeting Sequence)-short |
| 162 | Nucleic Acid | EraseR (N-terminal Secretory Signal Sequence (IL-2)-short |
| 163 | Nucleic Acid | EraseR (N-terminal Myristoylation (Membrane Targeting Sequence)-short |
| 164 | Nucleic Acid | EraseR (ER Localization-N-terminal Calsequestrin leader sequence)-short |
| 165 | Nucleic Acid | EraseR (ER Localization-C-terminal KDEL retention signal)-short |
| 166 | Nucleic Acid | EraseR (C-terminal Peroxisome Targeting Sequence)-short |
| 167 | Nucleic Acid | SARS-CoV-2 Leader Sequence |
| 168 | Nucleic Acid | SARS-CoV-2 Leader crRNA Target A |
| 169 | Nucleic Acid | SARS-CoV-2 Leader crRNA Target B |
| 170 | Nucleic Acid | SARS-CoV-2 Leader crRNA Target C |
| 171 | Nucleic Acid | SARS-CoV-2 Leader crRNA Target D |
| 172 | Nucleic Acid | SARS-CoV-2 Leader crRNA Target E |
| 173 | Nucleic Acid | SARS-CoV-2 Leader crRNA Target F |
| 174 | Nucleic Acid | SARS-CoV-2 Leader crRNA Target G |
| 175 | Nucleic Acid | SARS-2-CoV S2M sequence |
| 176 | Nucleic Acid | SARS-2-CoV S2M crRNA Target A |
| 177 | Nucleic Acid | SARS-2-CoV S2M crRNA Target B |
| 178 | Nucleic Acid | SARS-2-CoV S2M crRNA Target C |
| 179 | Nucleic Acid | SARS-2-CoV S2M crRNA Target D |
| 180 | Nucleic Acid | SARS-2-CoV S2M crRNA Target E |
| 181 | Nucleic Acid | SARS-2-CoV S2M crRNA Target F |
| 182 | Nucleic Acid | Bovine Coronavirus Leader Sequence |
| 183 | Nucleic Acid | SARS-CoV-2 3′ Stem-loop II-like (S2M) Sequence |
| 184 | Nucleic Acid | SARS-CoV-2 Nucleocapsid (N) Site A |
| 185 | Nucleic Acid | SARS-CoV-2 Nucleocapsid (N) Site B |
| 186 | Nucleic Acid | SARS-CoV-2 Nucleocapsid (N) Site A Target |
| 187 | Nucleic Acid | SARS-CoV-2 Nucleocapsid (N) Site B Target |
| 188 | Nucleic Acid | SARS-CoV-2 Leader Sequence |
| 189 | Nucleic Acid | SARS-CoV-2 Leader crRNA A |
| 190 | Nucleic Acid | SARS-CoV-2 Leader crRNA B |
| 191 | Nucleic Acid | SARS-CoV-2 Leader crRNA C |
| 192 | Nucleic Acid | SARS-CoV-2 Leader crRNA D |
| 193 | Nucleic Acid | SARS-CoV-2 Leader crRNA E |
| 194 | Nucleic Acid | SARS-CoV-2 Leader crRNA F |
| 195 | Nucleic Acid | SARS-CoV-2 Leader crRNA G |
| 196 | Nucleic Acid | SARS-CoV-2 S2M crRNA A |
| 197 | Nucleic Acid | SARS-CoV-2 S2M crRNA B |
| 198 | Nucleic Acid | SARS-CoV-2 S2M crRNA C |
| 199 | Nucleic Acid | SARS-CoV-2 S2M crRNA D |
| 200 | Nucleic Acid | SARS-CoV-2 S2M crRNA E |
| 201 | Nucleic Acid | SARS-CoV-2 S2M crRNA F |
| 202 | Nucleic Acid | SARS-CoV-2 Leader crRNA A |
| 203 | Nucleic Acid | SARS-CoV-2 Leader crRNA B |
| 204 | Nucleic Acid | SARS-CoV-2 Leader crRNA C |
| 205 | Nucleic Acid | SARS-CoV-2 Leader crRNA D |
| 206 | Nucleic Acid | SARS-CoV-2 Leader crRNA E |
| 207 | Nucleic Acid | SARS-CoV-2 Leader crRNA F |
| 208 | Nucleic Acid | SARS-CoV-2 Leader crRNA G |
| 209 | Nucleic Acid | BCV Leader crRNA A |
| 210 | Nucleic Acid | BCV Leader crRNA B |
| 211 | Nucleic Acid | BCV Leader crRNA C |
| 212 | Nucleic Acid | BCV Leader crRNA D |
| 213 | Nucleic Acid | BCV Leader crRNA E |
| 214 | Nucleic Acid | BCV Leader crRNA F |
| 215 | Nucleic Acid | BCV Leader crRNA G |
| 216 | Nucleic Acid | SARS-CoV-2 S2M crRNA A |
| 217 | Nucleic Acid | SARS-CoV-2 S2M crRNA B |
| 218 | Nucleic Acid | SARS-CoV-2 S2M crRNA C |
| 219 | Nucleic Acid | SARS-CoV-2 S2M crRNA D |
| 220 | Nucleic Acid | SARS-CoV-2 S2M crRNA E |
| 221 | Nucleic Acid | SARS-CoV-2 S2M crRNA F |
| 222 | Nucleic Acid | SARS-CoV-2 S2M crRNA G |
| 223 | Nucleic Acid | SARS-CoV-2 N crRNA A |
| 224 | Nucleic Acid | SARS-CoV-2 N crRNA B |
| 225 | Nucleic Acid | H1N1 Segment 1 crRNA target |
| 226 | Nucleic Acid | H3N2 Segment 1 crRNA target |
| 227 | Nucleic Acid | H7N9 Segment 1 crRNA target |
| 228 | Nucleic Acid | H2N2 Segment 1 crRNA target |
| 229 | Nucleic Acid | H1N1 Segment 2 crRNA target |
| 230 | Nucleic Acid | H3N2 Segment 2 crRNA target |
| 231 | Nucleic Acid | H7N9 Segment 2 crRNA target |
| 232 | Nucleic Acid | H2N2 Segment 2 crRNA target |
| 233 | Nucleic Acid | H1N1 Segment 3 crRNA target |
| 234 | Nucleic Acid | H3N2 Segment 3 crRNA target |
| 235 | Nucleic Acid | H7N9 Segment 3 crRNA target |
| 236 | Nucleic Acid | H2N2 Segment 3 crRNA target |
| 237 | Nucleic Acid | H1N1 Segment 5 crRNA target |
| 238 | Nucleic Acid | H3N2 Segment 5 crRNA target |
| 239 | Nucleic Acid | H7N9 Segment 5 crRNA target |
| 240 | Nucleic Acid | H2N2 Segment 5 crRNA target |
| 241 | Nucleic Acid | H1N1 Segment 7 crRNA target |
| 242 | Nucleic Acid | H3N2 Segment 7 crRNA target |
| 243 | Nucleic Acid | H7N9 Segment 7 crRNA target |
| 244 | Nucleic Acid | H2N2 Segment 7 crRNA target |
| 245 | Nucleic Acid | Flu + sense vRNA Segment 1 crRNA |
| 246 | Nucleic Acid | Flu + sense vRNA Segment 2 crRNA |
| 247 | Nucleic Acid | Flu + sense vRNA Segment 3 crRNA |
| 248 | Nucleic Acid | Flu + sense vRNA Segment 5 crRNA |
| 249 | Nucleic Acid | Flu + sense vRNA Segment 7 crRNA |
| 250 | Nucleic Acid | Flu (−) sense vRNA Segment 1 crRNA |
| 251 | Nucleic Acid | Flu (−) sense vRNA Segment 2 crRNA |
| 252 | Nucleic Acid | Flu (−) sense vRNA Segment 3 crRNA |
| 253 | Nucleic Acid | Flu (−) sense vRNA Segment 5 crRNA |
| 254 | Nucleic Acid | Flu (−) sense vRNA Segment 7 crRNA |
| 255 | Nucleic Acid | Cas 13d (+) sense targeting highly conserved Influenza A Seg 1 crRNA |
| 256 | Nucleic Acid | Cas 13d (+) sense targeting highly conserved Influenza A Seg 2 crRNA |
| 257 | Nucleic Acid | Cas 13d (+) sense targeting highly conserved Influenza A Seg 3 crRNA |
| 258 | Nucleic Acid | Cas 13d (+) sense targeting highly conserved Influenza A Seg 5 crRNA |
| 259 | Nucleic Acid | Cas 13d (+) sense targeting highly conserved Influenza A Seg 7 crRNA |
| 260 | Nucleic Acid | Cas 13d (−) sense targeting highly conserved Influenza A Seg 1 crRNA |
| 261 | Nucleic Acid | Cas 13d (−) sense targeting highly conserved Influenza A Seg 2 crRNA |
| 262 | Nucleic Acid | Cas 13d (−) sense targeting highly conserved Influenza A Seg 3 crRNA |
| 263 | Nucleic Acid | Cas 13d (−) sense targeting highly conserved Influenza A Seg 5 crRNA |
| 264 | Nucleic Acid | Cas 13d (−) sense targeting highly conserved Influenza A Seg 7 crRNA |
| 265 | Nucleic Acid | BzoCas13b crRNA direct repeat sequence |
| 266 | Nucleic Acid | PbTCas13b crRNA direct repeat sequence |
| 267 | Nucleic Acid | PspCas13b crRNA direct repeat sequence |
| 268 | Nucleic Acid | PspCas13b crRNA direct repeat sequence T17C |
| 269 | Nucleic Acid | PspCas13b crRNA direct repeat sequence T17A |
| 270 | Nucleic Acid | PspCas13b crRNA direct repeat sequence T17G |
| 271 | Nucleic Acid | PspCas13b crRNA direct repeat sequence T18C |
| 272 | Nucleic Acid | PspCas13b crRNA direct repeat sequence T18A |
| 273 | Nucleic Acid | PspCas13b crRNA direct repeat sequence T18G |
| 274 | Nucleic Acid | PspCas13b crRNA direct repeat sequence T19C |
| 275 | Nucleic Acid | LDR-D/N-B/S2M-D crRNA array with DR loop mutations |
| 276 | Nucleic Acid | Positive-sense Five-crRNA Array sequence (Segment order 1-2-3-5-7) |
| 277 | Nucleic Acid | Negative-sense Five-crRNA Array sequence (Segment order:2-1-3-5-7) |
| 278 | Nucleic Acid | Cas13d (+) sense Seg 1, 2, 3, 5, 7 crRNA array |
| 279 | Nucleic Acid | Cas13d (−) sense Seg 1, 2, 3, 5, 7 crRNA array |
| 280 | Nucleic Acid | Lentiviral Transfer Plasmid encoding Cytoplasmic PspCas13b and crRNA |
| | | (hU6-crRNA cassette-EF1a core promoter-3xFlag-NES-PspCas13b-WPRE) |
| 281 | Nucleic Acid | Lentiviral Transfer Plasmid encoding Nuclear PspCas13b and crRNA (hU6- |
| | | crRNA cassette-EF1a core promoter-3xFlag-TY1NLS-PspCas13b-WPRE) |
| 282 | Nucleic Acid | Single guide Lentiviral Gene Transfer Vector (LDR-D) 5′LTR-hU6-crRNA- |
| | | CBH-3xFLAG-NES-PspCas 13b-WPRE-3′ SINLTR |
| 283 | Nucleic Acid | Triple Guide Lentiviral Gene Transfer Vector (LDR-D, N-B, S2M-D) 5′LTR- |
| | | hU6-crRNAarray-CBH-3xFLAG-NES-PspCas13b-WPRE-3′SINLTR |
| 284 | Nucleic Acid | Triple Guide AAV Viral Vector (LDR-D, N-B, S2M-D) |
| 285 | Nucleic Acid | Luciferase Expression Cassette (SV40-5′UTR-Luc coding sequence-3′UTR- |
| | | SV40 poly(A)) |
| 286 | Nucleic Acid | Enhanced Luciferase Expression Cassette (SV40 Promoter-5′UTR-Luciferase |
| | | coding sequence-3′UTR-SV4O poly(A)-SV40 Enhancer) |
| 287 | Nucleic Acid | SV40 Promoter-5′UTR-Luciferase coding sequence-hC11-PestUTR-SV40 |
| | | poly(A)-SV40 Enhancer |
| 288 | Nucleic Acid | LUC (+) sense Seg 1 |
| 289 | Nucleic Acid | LUC (+) sense Seg 2 |
| 290 | Nucleic Acid | LUC (+) sense Seg 3 |
| 291 | Nucleic Acid | LUC (+) sense Seg 5 |
| 292 | Nucleic Acid | LUC (+) sense Seg 7 |
| 293 | Nucleic Acid | LUC (−) sense Seg 1 |
| 294 | Nucleic Acid | LUC (−) sense Seg 2 |
| 295 | Nucleic Acid | LUC (−) sense Seg 3 |
| 296 | Nucleic Acid | LUC (−) sense Seg 5 |
| 297 | Nucleic Acid | LUC (−) sense Seg 7 |
| 298 | Amino Acid | CPSF30 |
| 299 | Amino Acid | WDR33 |
| 300 | Amino Acid | NUDT21 |
| 301 | Amino Acid | WormNudT21 |
| 302 | Amino Acid | FlyNudT21 |
| 303 | Amino Acid | Zebrafish NUDT21 |
| 304 | Amino Acid | Human NUDT21 Truncation Mutant |
| 305 | Amino Acid | NUDT21 R63S |
| 306 | Amino Acid | NUDT21 Fl 03 A |
| 307 | Amino Acid | NudT21 Tandem Dimer |
| 308 | Amino Acid | dPspCas13b-CPSF30 fusion |
| 309 | Amino Acid | dPspCas13b-WDR33 fusion |
| 310 | Amino Acid | dPspCas13b- NUDT21 fusion |
| 311 | Nucleic Acid | CPSF30 |
| 312 | Nucleic Acid | WDR33 |
| 313 | Nucleic Acid | NUDT21 |
| 314 | Nucleic Acid | WormNudT21 |
| 315 | Nucleic Acid | FlyNudT21 |
| 316 | Nucleic Acid | Human NUDT21 Truncation Mutant |
| 317 | Nucleic Acid | NUDT21 R63S |
| 318 | Nucleic Acid | NUDT21 F103 A |
| 319 | Nucleic Acid | NudT21 Tandem Dimer |
| 320 | Nucleic Acid | dPspCas13b-CPSF30 fusion |
| 321 | Nucleic Acid | dPspCas13b-WDR33 fusion |
| 322 | Nucleic Acid | dPspCas13b- NUDT21 fusion |
| 323 | Amino Acid | Ty1-like NLS O28090-0 |
| 324 | Amino Acid | Ty1-like NLS O50087-0 |
| 325 | Amino Acid | Ty1-like NLS O58353-0 |
| 326 | Amino Acid | Ty1-like NLS Q57602-0 |
| 327 | Amino Acid | Ty1-like NLS Q6L1X9-0 |
| 328 | Amino Acid | Ty1-like NLS A0K3M1-0 |
| 329 | Amino Acid | Ty1-like NLS A0LYZ1-0 |
| 330 | Amino Acid | Ty1-like NLS A1B022-0 |
| 331 | Amino Acid | Ty1-like NLS A1V8A7-0 |
| 332 | Amino Acid | Ty1-like NLS A1VIP6-0 |
| 333 | Amino Acid | Ty1-like NLS A2RDW6-0 |
| 334 | Amino Acid | Ty1-like NLS A2S7H2-0 |
| 335 | Amino Acid | Ty1-like NLS A3MRV0-0 |
| 336 | Amino Acid | Ty1-like NLS A3NEI3-0 |
| 337 | Amino Acid | Ty1-like NLS A3P0B7-0 |
| 338 | Amino Acid | Ty1-like NLS A4JAN6-0 |
| 339 | Amino Acid | Ty1-like NLS A4SUV7-0 |
| 340 | Amino Acid | Ty1-like NLS A5FP03-0 |
| 341 | Amino Acid | Ty1-like NLS A5ILZ2-0 |
| 342 | Amino Acid | Ty1-like NLS A6GY20-0 |
| 343 | Amino Acid | Ty1-like NLS A6LLI5-0 |
| 344 | Amino Acid | Ty1-like NLS A6LQX4-0 |
| 345 | Amino Acid | Ty1-like NLS A8F6X2-0 |
| 346 | Amino Acid | Ty1-like NLS A8G6B7-0 |
| 347 | Amino Acid | Ty1-like NLS A9ADI9-0 |
| 348 | Amino Acid | Ty1-like NLS A9IJ08-0 |
| 349 | Amino Acid | Ty1-like NLS A9IXA1-0 |
| 350 | Amino Acid | Ty1-like NLS A9NEN2-0 |
| 351 | Amino Acid | Ty1-like NLS B0S140-0 |
| 352 | Amino Acid | Ty1-like NLS B1JU18-0 |
| 353 | Amino Acid | Ty1-like NLS B1LBA1-0 |
| 354 | Amino Acid | Ty1-like NLS B1W354-0 |
| 355 | Amino Acid | Ty1-like NLS B1XSP7-0 |
| 356 | Amino Acid | Ty1-like NLS B1YRC6-0 |
| 357 | Amino Acid | Ty1-like NLS B2JIH0-0 |
| 358 | Amino Acid | Ty1-like NLS B2T755-0 |
| 359 | Amino Acid | Ty1-like NLS B2UEM3-0 |
| 360 | Amino Acid | Ty1-like NLS B3PLU0-0 |
| 361 | Amino Acid | Ty1-like NLS B3R7T2-0 |
| 362 | Amino Acid | Ty1-like NLS B4E5B6-0 |
| 363 | Amino Acid | Ty1-like NLS B4S3C9-0 |
| 364 | Amino Acid | Ty1-like NLS B7IHT4-0 |
| 365 | Amino Acid | Ty1-like NLS B8E0X6-0 |
| 366 | Amino Acid | Ty1-like NLS B9K7W0-0 |
| 367 | Amino Acid | Ty1-like NLS C1A494-0 |
| 368 | Amino Acid | Ty1-like NLS C5CE41-0 |
| 369 | Amino Acid | Ty1-like NLS O88058-0 |
| 370 | Amino Acid | Ty1-like NLS P0DG92-0 |
| 371 | Amino Acid | Ty1-like NLS P0DG93-O |
| 372 | Amino Acid | Ty1-like NLS P60554-0 |
| 373 | Amino Acid | Ty1-like NLS P67354-0 |
| 374 | Amino Acid | Ty1-like NLS P75311-0 |
| 375 | Amino Acid | Ty1-like NLS P75471-0 |
| 376 | Amino Acid | Ty1-like NLS P94372-0 |
| 377 | Amino Acid | Ty1-like NLS Q056Y0-0 |
| 378 | Amino Acid | Ty1-like NLS Q057D7-0 |
| 379 | Amino Acid | Ty1-like NLS Q0AYB7-0 |
| 380 | Amino Acid | Ty1-like NLS Q0BJ50-0 |
| 381 | Amino Acid | Ty1-like NLS Q0K610-0 |
| 382 | Amino Acid | Ty1-like NLS Q0STA4-0 |
| 383 | Amino Acid | Ty1-like NLS Q0STL9-0 |
| 384 | Amino Acid | Ty1-like NLS Q0TQV7-0 |
| 385 | Amino Acid | Ty1-like NLS Q0TR88-0 |
| 386 | Amino Acid | Ty1-like NLS Q12GX5-0 |
| 387 | Amino Acid | Ty1-like NLS Q13TG6-0 |
| 388 | Amino Acid | Ty1-like NLS Q1AWG1-0 |
| 389 | Amino Acid | Ty1-like NLS Q1BRU4-0 |
| 390 | Amino Acid | Ty1-like NLS Q1J5X5-0 |
| 391 | Amino Acid | Ty1-like NLS QUAY8-0 |
| 392 | Amino Acid | Ty1-like NLS Q1JG57-0 |
| 393 | Amino Acid | Ty1-like NLS Q1JL34-0 |
| 394 | Amino Acid | Ty1-like NLS Q1LI28-0 |
| 395 | Amino Acid | Ty1-like NLS Q2L2H3-0 |
| 396 | Amino Acid | Ty1-like NLS Q2NIH1-0 |
| 397 | Amino Acid | Ty1-like NLS Q2SU23-0 |
| 398 | Amino Acid | Ty1-like NLS Q39KH1-0 |
| 399 | Amino Acid | Ty1-like NLS Q3JMQ8-0 |
| 400 | Amino Acid | Ty1-like NLS Q3YRL8-0 |
| 401 | Amino Acid | Ty1-like NLS Q46WD9-0 |
| 402 | Amino Acid | Ty1-like NLS Q48SQ4-0 |
| 403 | Amino Acid | Ty1-like NLS Q49418-0 |
| 404 | Amino Acid | Ty1-like NLS Q56307-0 |
| 405 | Amino Acid | Ty1-like NLS Q5LEQ4-0 |
| 406 | Amino Acid | Ty1-like NLS Q5WEJ7-0 |
| 407 | Amino Acid | Ty1-like NLS Q5XBA0-0 |
| 408 | Amino Acid | Ty1-like NLS Q62GK1-0 |
| 409 | Amino Acid | Ty1-like NLS Q63Q07-0 |
| 410 | Amino Acid | Ty1-like NLS Q64VP0-0 |
| 411 | Amino Acid | Ty1-like NLS Q6G3V1-0 |
| 412 | Amino Acid | Ty1-like NLS Q6G5M0-0 |
| 413 | Amino Acid | Ty1-like NLS Q6LLQ8-0 |
| 414 | Amino Acid | Ty1-like NLS Q6MDC1-0 |
| 415 | Amino Acid | Ty1-like NLS Q6MDH4-0 |
| 416 | Amino Acid | Ty1-like NLS Q6ME08-0 |
| 417 | Amino Acid | Ty1-like NLS Q73PH4-0 |
| 418 | Amino Acid | Ty1-like NLS Q7MAD1-0 |
| 419 | Amino Acid | Ty1-like NLS Q7UP72-0 |
| 420 | Amino Acid | Ty1-like NLS Q7VTD6-0 |
| 421 | Amino Acid | Ty1-like NLS Q7W2F9-0 |
| 422 | Amino Acid | Ty1-like NLS Q7WRC8-0 |
| 423 | Amino Acid | Ty1-like NLS Q828D0-0 |
| 424 | Amino Acid | Ty1-like NLS Q895M9-0 |
| 425 | Amino Acid | Ty1-like NLS Q8AAP0-0 |
| 426 | Amino Acid | Ty1-like NLS Q8D1X2-0 |
| 427 | Amino Acid | Ty1-like NLS Q8K908-0 |
| 428 | Amino Acid | Ty1-like NLS Q8P0C9-0 |
| 429 | Amino Acid | Ty1-like NLS Q8XKR1-0 |
| 430 | Amino Acid | Ty1-like NLS Q8XL46-0 |
| 431 | Amino Acid | Ty1-like NLS Q8XV09-0 |
| 432 | Amino Acid | Ty1-like NLS Q93Q47-0 |
| 433 | Amino Acid | Ty1-like NLS Q9L0Q6-0 |
| 434 | Amino Acid | Ty1-like NLS Q9L0Q6-1 |
| 435 | Amino Acid | Ty1-like NLS Q9L0Q6-2 |
| 436 | Amino Acid | Ty1-like NLS Q9L0Q6-3 |
| 437 | Amino Acid | Ty1-like NLS Q9L0Q6-4 |
| 438 | Amino Acid | Ty1-like NLS Q9L0Q6-5 |
| 439 | Amino Acid | Ty1-like NLS Q9L0Q6-6 |
| 440 | Amino Acid | Ty1-like NLS Q9X1S8-0 |
| 441 | Amino Acid | Ty1-like NLS A1CNV8-0 |
| 442 | Amino Acid | Ty1-like NLS A1D1R8-0 |
| 443 | Amino Acid | Ty1-like NLS A1D731-0 |
| 444 | Amino Acid | Ty1-like NLS A2QAX7-0 |
| 445 | Amino Acid | Ty1-like NLS A3LQ55-0 |
| 446 | Amino Acid | Ty1-like NLS A5DGY0-0 |
| 447 | Amino Acid | Ty1-like NLS A5DKW3-0 |
| 448 | Amino Acid | Ty1-like NLS A5DLG8-0 |
| 449 | Amino Acid | Ty1-like NLS A5DY34-0 |
| 450 | Amino Acid | Ty1-like NLS A6RBB0-0 |
| 451 | Amino Acid | Ty1-like NLS A6RMZ2-0 |
| 452 | Amino Acid | Ty1-like NLS A6ZL85-0 |
| 453 | Amino Acid | Ty1-like NLS A6ZZJ1-0 |
| 454 | Amino Acid | Ty1-like NLS A7E4K0-0 |
| 455 | Amino Acid | Ty1-like NLS G0S8I1-0 |
| 456 | Amino Acid | Ty1-like NLS O13527-0 |
| 457 | Amino Acid | Ty1-like NLS O13535-0 |
| 458 | Amino Acid | Ty1-like NLS O13658-0 |
| 459 | Amino Acid | Ty1-like NLS O14064-0 |
| 460 | Amino Acid | Ty1-like NLS O14076-0 |
| 461 | Amino Acid | Ty1-like NLS O42668-0 |
| 462 | Amino Acid | Ty1-like NLS O43068-0 |
| 463 | Amino Acid | Ty1-like NLS O74777-0 |
| 464 | Amino Acid | Ty1-like NLS O74862-0 |
| 465 | Amino Acid | Ty1-like NLS O94383-0 |
| 466 | Amino Acid | Ty1-like NLS O94487-0 |
| 467 | Amino Acid | Ty1-like NLS O94585-0 |
| 468 | Amino Acid | Ty1-like NLS O94652-0 |
| 469 | Amino Acid | Ty1-like NLS P0C2I2-0 |
| 470 | Amino Acid | Ty1-like NLS P0C2I3-0 |
| 471 | Amino Acid | Ty1-like NLS P0C2I5-0 |
| 472 | Amino Acid | Ty1-like NLS P0C2I6-0 |
| 473 | Amino Acid | Ty1-like NLS P0C2I7-0 |
| 474 | Amino Acid | Ty1-like NLS P0C2I9-0 |
| 475 | Amino Acid | Ty1-like NLS P0C2J0-0 |
| 476 | Amino Acid | Ty1-like NLS P0C2J1-0 |
| 477 | Amino Acid | Ty1-like NLS P0C2J3-0 |
| 478 | Amino Acid | Ty1-like NLS P0C2J5-0 |
| 479 | Amino Acid | Ty1-like NLS P0CM98-0 |
| 480 | Amino Acid | Ty1-like NLS P0CM99-0 |
| 481 | Amino Acid | Ty1-like NLS P0CX63-0 |
| 482 | Amino Acid | Ty1-like NLS P0CX64-0 |
| 483 | Amino Acid | Ty1-like NLS P13902-0 |
| 484 | Amino Acid | Ty1-like NLS P14746-0 |
| 485 | Amino Acid | Ty1-like NLS P20484-0 |
| 486 | Amino Acid | Ty1-like NLS P22936-0 |
| 487 | Amino Acid | Ty1-like NLS P25384-0 |
| 488 | Amino Acid | Ty1-like NLS P32597-0 |
| 489 | Amino Acid | Ty1-like NLS P36006-0 |
| 490 | Amino Acid | Ty1-like NLS P36080-0 |
| 491 | Amino Acid | Ty1-like NLS P38112-0 |
| 492 | Amino Acid | Ty1-like NLS P47098-0 |
| 493 | Amino Acid | Ty1-like NLS P47100-0 |
| 494 | Amino Acid | Ty1-like NLS P51599-0 |
| 495 | Amino Acid | Ty1-like NLS P53119-0 |
| 496 | Amino Acid | Ty1-like NLS P53123-0 |
| 497 | Amino Acid | Ty1-like NLS P53125-0 |
| 498 | Amino Acid | Ty1-like NLS Q01301-0 |
| 499 | Amino Acid | Ty1-like NLS Q03434-0 |
| 500 | Amino Acid | Ty1-like NLS Q03494-0 |
| 501 | Amino Acid | Ty1-like NLS Q03612-0 |
| 502 | Amino Acid | Ty1-like NLS Q03619-0 |
| 503 | Amino Acid | Ty1-like NLS Q03707-0 |
| 504 | Amino Acid | Ty1-like NLS Q03855-0 |
| 505 | Amino Acid | Ty1-like NLS Q04214-0 |
| 506 | Amino Acid | Ty1-like NLS Q04500-0 |
| 507 | Amino Acid | Ty1-like NLS Q04670-0 |
| 508 | Amino Acid | Ty1-like NLS Q04711-0 |
| 509 | Amino Acid | Ty1-like NLS Q06132-0 |
| 510 | Amino Acid | Ty1-like NLS Q07163-0 |
| 511 | Amino Acid | Ty1-like NLS Q07509-0 |
| 512 | Amino Acid | Ty1-like NLS Q07791-0 |
| 513 | Amino Acid | Ty1-like NLS Q07793-0 |
| 514 | Amino Acid | Ty1-like NLS Q09094-0 |
| 515 | Amino Acid | Ty1-like NLS Q09180-0 |
| 516 | Amino Acid | Ty1-like NLS Q09180-1 |
| 517 | Amino Acid | Ty1-like NLS Q09180-2 |
| 518 | Amino Acid | Ty1-like NLS Q09863-0 |
| 519 | Amino Acid | Ty1-like NLS Q0U8V9-0 |
| 520 | Amino Acid | Ty1-like NLS Q12088-0 |
| 521 | Amino Acid | Ty1-like NLS Q12112-0 |
| 522 | Amino Acid | Ty1-like NLS Q12113-0 |
| 523 | Amino Acid | Ty1-like NLS Q12141-0 |
| 524 | Amino Acid | Ty1-like NLS Q12193-0 |
| 525 | Amino Acid | Ty1-like NLS Q12269-0 |
| 526 | Amino Acid | Ty1-like NLS Q12273-0 |
| 527 | Amino Acid | Ty1-like NLS Q12316-0 |
| 528 | Amino Acid | Ty1-like NLS Q12337-0 |
| 529 | Amino Acid | Ty1-like NLS Q12339-0 |
| 530 | Amino Acid | Ty1-like NLS Q12414-0 |
| 531 | Amino Acid | Ty1-like NLS Q12472-0 |
| 532 | Amino Acid | Ty1-like NLS Q12490-0 |
| 533 | Amino Acid | Ty1-like NLS Q12491-0 |
| 534 | Amino Acid | Ty1-like NLS Q12501-0 |
| 535 | Amino Acid | Ty1-like NLS Q1DNW5-0 |
| 536 | Amino Acid | Ty1-like NLS Q1EA54-0 |
| 537 | Amino Acid | Ty1-like NLS Q2HFA6-0 |
| 538 | Amino Acid | Ty1-like NLS Q2HFA6-1 |
| 539 | Amino Acid | Ty1-like NLS Q2UQI6-0 |
| 540 | Amino Acid | Ty1-like NLS Q4HZ42-0 |
| 541 | Amino Acid | Ty1-like NLS Q4P6I3-0 |
| 542 | Amino Acid | Ty1-like NLS Q4WHF8-0 |
| 543 | Amino Acid | Ty1-like NLS Q4WRV2-0 |
| 544 | Amino Acid | Ty1-like NLS Q4WXQ7-0 |
| 545 | Amino Acid | Ty1-like NLS Q5A2K0-0 |
| 546 | Amino Acid | Ty1-like NLS Q5A310-0 |
| 547 | Amino Acid | Ty1-like NLS Q5ACW8-0 |
| 548 | Amino Acid | Ty1-like NLS Q5B6K3-0 |
| 549 | Amino Acid | Ty1-like NLS Q6BXL7-0 |
| 550 | Amino Acid | Ty1-like NLS Q6C1L3-0 |
| 551 | Amino Acid | Ty1-like NLS Q6C233-0 |
| 552 | Amino Acid | Ty1-like NLS Q6C2J1-0 |
| 553 | Amino Acid | Ty1-like NLS Q6C7C0-0 |
| 554 | Amino Acid | Ty1-like NLS Q6CJY0-0 |
| 555 | Amino Acid | Ty1-like NLS Q6CJYO-1 |
| 556 | Amino Acid | Ty1-like NLS Q6FML5-0 |
| 557 | Amino Acid | Ty1-like NLS Q75F02-0 |
| 558 | Amino Acid | Ty1-like NLS Q7S2A9-0 |
| 559 | Amino Acid | Ty1-like NLS Q7S9J4-0 |
| 560 | Amino Acid | Ty1-like NLS Q7SFJ3-0 |
| 561 | Amino Acid | Ty1-like NLS Q875K1-0 |
| 562 | Amino Acid | Ty1-like NLS Q8SUT1-0 |
| 563 | Amino Acid | Ty1-like NLS Q8SVI7-0 |
| 564 | Amino Acid | Ty1-like NLS Q8SVI7-1 |
| 565 | Amino Acid | Ty1-like NLS Q92393-0 |
| 566 | Amino Acid | Ty1-like NLS Q99109-0 |
| 567 | Amino Acid | Ty1-like NLS Q99231-0 |
| 568 | Amino Acid | Ty1-like NLS Q99337-0 |
| 569 | Amino Acid | Ty1-like NLS Q9USK2-0 |
| 570 | Amino Acid | Ty1-like NLS Q9UTQ5-0 |
| 571 | Amino Acid | Ty1-like NLS A7MD48-0 |
| 572 | Amino Acid | Ty1-like NLS O15446-0 |
| 573 | Amino Acid | Ty1-like NLS O15446-1 |
| 574 | Amino Acid | Ty1-like NLS O15446-2 |
| 575 | Amino Acid | Ty1-like NLS O43148-0 |
| 576 | Amino Acid | Ty1-like NLS O60271-0 |
| 577 | Amino Acid | Ty1-like NLS O75128-0 |
| 578 | Amino Acid | Ty1-like NLS O75400-0 |
| 579 | Amino Acid | Ty1-like NLS O75691-0 |
| 580 | Amino Acid | Ty1-like NLS O75937-0 |
| 581 | Amino Acid | Ty1-like NLS O76021-0 |
| 582 | Amino Acid | Ty1-like NLS O94964-0 |
| 583 | Amino Acid | Ty1-like NLS P23497-0 |
| 584 | Amino Acid | Ty1-like NLS P30414-0 |
| 585 | Amino Acid | Ty1-like NLS P42081-0 |
| 586 | Amino Acid | Ty1-like NLS P46100-0 |
| 587 | Amino Acid | Ty1-like NLS P51608-0 |
| 588 | Amino Acid | Ty1-like NLS P59797-0 |
| 589 | Amino Acid | Ty1-like NLS P82979-0 |
| 590 | Amino Acid | Ty1-like NLS Q12830-0 |
| 591 | Amino Acid | Ty1-like NLS Q13409-0 |
| 592 | Amino Acid | Ty1-like NLS Q13427-0 |
| 593 | Amino Acid | Ty1-like NLS Q15361-0 |
| 594 | Amino Acid | Ty1-like NLS Q15361-1 |
| 595 | Amino Acid | Ty1-like NLS Q53SF7-0 |
| 596 | Amino Acid | Ty1-like NLS Q5M9Q1-0 |
| 597 | Amino Acid | Ty1-like NLS Q5T3I0-0 |
| 598 | Amino Acid | Ty1-like NLS Q5T3I0-1 |
| 599 | Amino Acid | Ty1-like NLS Q68D10-0 |
| 600 | Amino Acid | Ty1-like NLS Q6IPR3-0 |
| 601 | Amino Acid | Ty1-like NLS Q6PD62-0 |
| 602 | Amino Acid | Ty1-like NLS Q6PD62-1 |
| 603 | Amino Acid | Ty1-like NLS Q6PD62-2 |
| 604 | Amino Acid | Ty1-like NLS Q6S8J7-0 |
| 605 | Amino Acid | Ty1-like NLS Q6ZU65-0 |
| 606 | Amino Acid | Ty1-like NLS Q7Z7B0-0 |
| 607 | Amino Acid | Ty1-like NLS Q8N9E0-0 |
| 608 | Amino Acid | Ty1-like NLS Q8NCU4-0 |
| 609 | Amino Acid | Ty1-like NLS Q8NFU7-0 |
| 610 | Amino Acid | Ty1-like NLS Q96DY2-0 |
| 611 | Amino Acid | Ty1-like NLS Q96GD3-0 |
| 612 | Amino Acid | Ty1-like NLS Q96P65-0 |
| 613 | Amino Acid | Ty1-like NLS Q96QC0-0 |
| 614 | Amino Acid | Ty1-like NLS Q9BQG0-0 |
| 615 | Amino Acid | Ty1-like NLS Q9BQG0-1 |
| 616 | Amino Acid | Ty1-like NLS Q9BRU9-0 |
| 617 | Amino Acid | Ty1-like NLS Q9H0S4-0 |
| 618 | Amino Acid | Ty1-like NLS Q9H6F5-0 |
| 619 | Amino Acid | Ty1-like NLS Q9HCK1-0 |
| 620 | Amino Acid | Ty1-like NLS Q9HCK8-0 |
| 621 | Amino Acid | Ty1-like NLS Q9NPI1-0 |
| 622 | Amino Acid | Ty1-like NLS Q9NSV4-0 |
| 623 | Amino Acid | Ty1-like NLS Q9NUL3-0 |
| 624 | Amino Acid | Ty1-like NLS Q9NWT1-0 |
| 625 | Amino Acid | Ty1-like NLS Q9NX58-0 |
| 626 | Amino Acid | Ty1-like NLS Q9UGU5-0 |
| 627 | Amino Acid | Ty1-like NLS Q9UNS1-0 |
| 628 | Amino Acid | Ty1-like NLS Q9Y2X3-0 |
| 629 | Amino Acid | Ty1-like NLS Q9Y6X0-0 |
| 630 | Amino Acid | Ty1-like NLS A0A1I8M2I8-0 |
| 631 | Amino Acid | Ty1-like NLS A1XDC0-0 |
| 632 | Amino Acid | Ty1-like NLS A7S6A5-0 |
| 633 | Amino Acid | Ty1-like NLS A8XI07-0 |
| 634 | Amino Acid | Ty1-like NLS A8XI07-1 |
| 635 | Amino Acid | Ty1-like NLS C0HKU9-0 |
| 636 | Amino Acid | Ty1-like NLS C6KTD2-0 |
| 637 | Amino Acid | Ty1-like NLS O16140-0 |
| 638 | Amino Acid | Ty1-like NLS O17828-0 |
| 639 | Amino Acid | Ty1-like NLS O17966-0 |
| 640 | Amino Acid | Ty1-like NLS O44410-0 |
| 641 | Amino Acid | Ty1-like NLS O44410-1 |
| 642 | Amino Acid | Ty1-like NLS O45244-0 |
| 643 | Amino Acid | Ty1-like NLS P0DP78-0 |
| 644 | Amino Acid | Ty1-like NLS P0DP78-1 |
| 645 | Amino Acid | Ty1-like NLS P0DP79-0 |
| 646 | Amino Acid | Ty1-like NLS P0DP79-1 |
| 647 | Amino Acid | Ty1-like NLS P0DP80-0 |
| 648 | Amino Acid | Ty1-like NLS P0DP80-1 |
| 649 | Amino Acid | Ty1-like NLS P0DP81-0 |
| 650 | Amino Acid | Ty1-like NLS P0DP81-1 |
| 651 | Amino Acid | Ty1-like NLS P14196-0 |
| 652 | Amino Acid | Ty1-like NLS P22058-0 |
| 653 | Amino Acid | Ty1-like NLS P26023-0 |
| 654 | Amino Acid | Ty1-like NLS P26991-0 |
| 655 | Amino Acid | Ty1-like NLS P35978-0 |
| 656 | Amino Acid | Ty1-like NLS P46758-0 |
| 657 | Amino Acid | Ty1-like NLS P46758-1 |
| 658 | Amino Acid | Ty1-like NLS P46867-0 |
| 659 | Amino Acid | Ty1-like NLS P54644-0 |
| 660 | Amino Acid | Ty1-like NLS P54812-0 |
| 661 | Amino Acid | Ty1-like NLS P83212-0 |
| 662 | Amino Acid | Ty1-like NLS Q04621-0 |
| 663 | Amino Acid | Ty1-like NLS Q08696-0 |
| 664 | Amino Acid | Ty1-like NLS Q08696-1 |
| 665 | Amino Acid | Ty1-like NLS Q08696-2 |
| 666 | Amino Acid | Ty1-like NLS Q08696-3 |
| 667 | Amino Acid | Ty1-like NLS Q08696-4 |
| 668 | Amino Acid | Ty1-like NLS Q08696-5 |
| 669 | Amino Acid | Ty1-like NLS Q08696-6 |
| 670 | Amino Acid | Ty1-like NLS Q09223-0 |
| 671 | Amino Acid | Ty1-like NLS Q09595-0 |
| 672 | Amino Acid | Ty1-like NLS Q1ELU8-0 |
| 673 | Amino Acid | Ty1-like NLS Q23120-0 |
| 674 | Amino Acid | Ty1-like NLS Q23272-0 |
| 675 | Amino Acid | Ty1-like NLS Q24537-0 |
| 676 | Amino Acid | Ty1-like NLS Q27450-0 |
| 677 | Amino Acid | Ty1-like NLS Q29DY1-0 |
| 678 | Amino Acid | Ty1-like NLS Q4N4T9-0 |
| 679 | Amino Acid | Ty1-like NLS Q54QQ2-0 |
| 680 | Amino Acid | Ty1-like NLS Q54QQ2-1 |
| 681 | Amino Acid | Ty1-like NLS Q54S20-0 |
| 682 | Amino Acid | Ty1-like NLS Q54US6-0 |
| 683 | Amino Acid | Ty1-like NLS Q54VU4-0 |
| 684 | Amino Acid | Ty1-like NLS Q54XP6-0 |
| 685 | Amino Acid | Ty1-like NLS Q551H0-0 |
| 686 | Amino Acid | Ty1-like NLS Q557G1-0 |
| 687 | Amino Acid | Ty1-like NLS Q55CE0-0 |
| 688 | Amino Acid | Ty1-like NLS Q61R02-0 |
| 689 | Amino Acid | Ty1-like NLS Q75JP5-0 |
| 690 | Amino Acid | Ty1-like NLS Q8I5P7-0 |
| 691 | Amino Acid | Ty1-like NLS Q8I5P7-1 |
| 692 | Amino Acid | Ty1-like NLS Q8IBP1-0 |
| 693 | Amino Acid | Ty1-like NLS Q8ILR9-0 |
| 694 | Amino Acid | Ty1-like NLS Q93591-0 |
| 695 | Amino Acid | Ty1-like NLS Q95Y36-0 |
| 696 | Amino Acid | Ty1-like NLS Q9NBL2-0 |
| 697 | Amino Acid | Ty1-like NLS Q9NDE8-0 |
| 698 | Amino Acid | Ty1-like NLS Q9NDE8-1 |
| 699 | Amino Acid | Ty1-like NLS Q9NDE8-2 |
| 700 | Amino Acid | Ty1-like NLS Q9V5P6-0 |
| 701 | Amino Acid | Ty1-like NLS Q9VDS6-0 |
| 702 | Amino Acid | Ty1-like NLS Q9VGW1-0 |
| 703 | Amino Acid | Ty1-like NLS Q9VH89-0 |
| 704 | Amino Acid | Ty1-like NLS Q9VKM6-0 |
| 705 | Amino Acid | Ty1-like NLS Q9VNH1-0 |
| 706 | Amino Acid | Ty1-like NLS Q9W261-0 |
| 707 | Amino Acid | Ty1-like NLS E1B7L7-0 |
| 708 | Amino Acid | Ty1-like NLS Q08DU1-0 |
| 709 | Amino Acid | Ty1-like NLS Q0III3-0 |
| 710 | Amino Acid | Ty1-like NLS Q17QH9-0 |
| 711 | Amino Acid | Ty1-like NLS Q29S22-0 |
| 712 | Amino Acid | Ty1-like NLS Q2KIQ2-0 |
| 713 | Amino Acid | Ty1-like NLS Q2KJE1-0 |
| 714 | Amino Acid | Ty1-like NLS Q2KJE1-1 |
| 715 | Amino Acid | Ty1-like NLS Q2TBX7-0 |
| 716 | Amino Acid | Ty1-like NLS Q4R7K1-0 |
| 717 | Amino Acid | Ty1-like NLS Q4R8Y5-0 |
| 718 | Amino Acid | Ty1-like NLS Q58DE2-0 |
| 719 | Amino Acid | Ty1-like NLS Q58DU0-0 |
| 720 | Amino Acid | Ty1-like NLS Q5E9U4-0 |
| 721 | Amino Acid | Ty1-like NLS Q5NVM2-0 |
| 722 | Amino Acid | Ty1-like NLS Q5R4V4-0 |
| 723 | Amino Acid | Ty1-like NLS Q5R8B0-0 |
| 724 | Amino Acid | Ty1-like NLS Q5RB69-0 |
| 725 | Amino Acid | Ty1-like NLS Q5RCE6-0 |
| 726 | Amino Acid | Ty1-like NLS Q5TM61-0 |
| 727 | Amino Acid | Ty1-like NLS Q767K9-0 |
| 728 | Amino Acid | Ty1-like NLS Q7YQM3-0 |
| 729 | Amino Acid | Ty1-like NLS Q7YQM4-0 |
| 730 | Amino Acid | Ty1-like NLS Q7YR38-0 |
| 731 | Amino Acid | Ty1-like NLS Q95KD7-0 |
| 732 | Amino Acid | Ty1-like NLS Q95LG8-0 |
| 733 | Amino Acid | Ty1-like NLS Q9N1Q7-0 |
| 734 | Amino Acid | Ty1-like NLS A2WSD3-0 |
| 735 | Amino Acid | Ty1-like NLS A2XVF7-0 |
| 736 | Amino Acid | Ty1-like NLS A2XVF7-1 |
| 737 | Amino Acid | Ty1-like NLS A2XVF7-2 |
| 738 | Amino Acid | Ty1-like NLS A2XVF7-3 |
| 739 | Amino Acid | Ty1-like NLS A3AVH5-0 |
| 740 | Amino Acid | Ty1-like NLS A3AVH5-1 |
| 741 | Amino Acid | Ty1-like NLS A3AVH5-2 |
| 742 | Amino Acid | Ty1-like NLS A3AVH5-3 |
| 743 | Amino Acid | Ty1-like NLS A4QJZ0-0 |
| 744 | Amino Acid | Ty1-like NLS A4QK78-0 |
| 745 | Amino Acid | Ty1-like NLS A4QKG5-0 |
| 746 | Amino Acid | Ty1-like NLS A4QKQ3-0 |
| 747 | Amino Acid | Ty1-like NLS A6MN03-0 |
| 748 | Amino Acid | Ty1-like NLS A8MS85-0 |
| 749 | Amino Acid | Ty1-like NLS A9XMT3-0 |
| 750 | Amino Acid | Ty1-like NLS B8YIE8-0 |
| 751 | Amino Acid | Ty1-like NLS F4HVZ5-0 |
| 752 | Amino Acid | Ty1-like NLS F4IQK5-0 |
| 753 | Amino Acid | Ty1-like NLS F4IQK5-1 |
| 754 | Amino Acid | Ty1-like NLS O22812-0 |
| 755 | Amino Acid | Ty1-like NLS O49323-0 |
| 756 | Amino Acid | Ty1-like NLS O64571-0 |
| 757 | Amino Acid | Ty1-like NLS O64639-0 |
| 758 | Amino Acid | Ty1-like NLS O64639-1 |
| 759 | Amino Acid | Ty1-like NLS O64639-2 |
| 760 | Amino Acid | Ty1-like NLS O65743-0 |
| 761 | Amino Acid | Ty1-like NLS O81072-0 |
| 762 | Amino Acid | Ty1-like NLS P09975-0 |
| 763 | Amino Acid | Ty1-like NLS P0C262-0 |
| 764 | Amino Acid | Ty1-like NLS P29345-0 |
| 765 | Amino Acid | Ty1-like NLS P50888-0 |
| 766 | Amino Acid | Ty1-like NLS P51269-0 |
| 767 | Amino Acid | Ty1-like NLS P51430-0 |
| 768 | Amino Acid | Ty1-like NLS Q06FP6-0 |
| 769 | Amino Acid | Ty1-like NLS Q06FP6-1 |
| 770 | Amino Acid | Ty1-like NLS Q06FP6-2 |
| 771 | Amino Acid | Ty1-like NLS Q06R72-0 |
| 772 | Amino Acid | Ty1-like NLS Q06R98-0 |
| 773 | Amino Acid | Ty1-like NLS Q1KVQ9-0 |
| 774 | Amino Acid | Ty1-like NLS Q1XDL7-0 |
| 775 | Amino Acid | Ty1-like NLS Q38873-0 |
| 776 | Amino Acid | Ty1-like NLS Q3E8X3-0 |
| 777 | Amino Acid | Ty1-like NLS Q3ZJ77-0 |
| 778 | Amino Acid | Ty1-like NLS Q42438-0 |
| 779 | Amino Acid | Ty1-like NLS Q4V3E0-0 |
| 780 | Amino Acid | Ty1-like NLS Q66GN2-0 |
| 781 | Amino Acid | Ty1-like NLS Q6K5K2-0 |
| 782 | Amino Acid | Ty1-like NLS Q6YS30-0 |
| 783 | Amino Acid | Ty1-like NLS Q84WK0-0 |
| 784 | Amino Acid | Ty1-like NLS Q84Y18-0 |
| 785 | Amino Acid | Ty1-like NLS Q8H991-0 |
| 786 | Amino Acid | Ty1-like NLS Q8RWY7-0 |
| 787 | Amino Acid | Ty1-like NLS Q8RWY7-1 |
| 788 | Amino Acid | Ty1-like NLS Q8VZ67-0 |
| 789 | Amino Acid | Ty1-like NLS Q8VZN4-0 |
| 790 | Amino Acid | Ty1-like NLS Q8W0K2-0 |
| 791 | Amino Acid | Ty1-like NLS Q8W490-0 |
| 792 | Amino Acid | Ty1-like NLS Q9CAE4-0 |
| 793 | Amino Acid | Ty1-like NLS Q9FMZ4-0 |
| 794 | Amino Acid | Ty1-like NLS Q9FMZ4-1 |
| 795 | Amino Acid | Ty1-like NLS Q9FRI0-0 |
| 796 | Amino Acid | Ty1-like NLS Q9LKI5-0 |
| 797 | Amino Acid | Ty1-like NLS Q9LUJ5-0 |
| 798 | Amino Acid | Ty1-like NLS Q9LUR0-0 |
| 799 | Amino Acid | Ty1-like NLS Q9LVU8-0 |
| 800 | Amino Acid | Ty1-like NLS Q9LVU8-1 |
| 801 | Amino Acid | Ty1-like NLS Q9LYK7-0 |
| 802 | Amino Acid | Ty1-like NLS Q9M020-0 |
| 803 | Amino Acid | Ty1-like NLS Q9M1L7-0 |
| 804 | Amino Acid | Ty1-like NLS Q9M3V8-0 |
| 805 | Amino Acid | Ty1-like NLS Q9SRQ3-0 |
| 806 | Amino Acid | Ty1-like NLS Q9ZPV5-0 |
| 807 | Amino Acid | Ty1-like NLS B1AQJ2-0 |
| 808 | Amino Acid | Ty1-like NLS D3ZUI5-0 |
| 809 | Amino Acid | Ty1-like NLS D4A666-0 |
| 810 | Amino Acid | Ty1-like NLS E1U8D0-0 |
| 811 | Amino Acid | Ty1-like NLS G3V8T1-0 |
| 812 | Amino Acid | Ty1-like NLS O35821-0 |
| 813 | Amino Acid | Ty1-like NLS O88487-0 |
| 814 | Amino Acid | Ty1-like NLS O88665-0 |
| 815 | Amino Acid | Ty1-like NLS P61364-0 |
| 816 | Amino Acid | Ty1-like NLS P61365-0 |
| 817 | Amino Acid | Ty1-like NLS P83858-0 |
| 818 | Amino Acid | Ty1-like NLS P83861-0 |
| 819 | Amino Acid | Ty1-like NLS Q00566-0 |
| 820 | Amino Acid | Ty1-like NLS Q05CL8-0 |
| 821 | Amino Acid | Ty1-like NLS Q09XV5-0 |
| 822 | Amino Acid | Ty1-like NLS Q3TFK5-0 |
| 823 | Amino Acid | Ty1-like NLS Q3TFK5-1 |
| 824 | Amino Acid | Ty1-like NLS Q3TFK5-2 |
| 825 | Amino Acid | Ty1-like NLS Q3TYA6-0 |
| 826 | Amino Acid | Ty1-like NLS Q3UMF0-0 |
| 827 | Amino Acid | Ty1-like NLS Q498U4-0 |
| 828 | Amino Acid | Ty1-like NLS Q4V7C4-0 |
| 829 | Amino Acid | Ty1-like NLS Q4V8G7-0 |
| 830 | Amino Acid | Ty1-like NLS Q505I5-0 |
| 831 | Amino Acid | Ty1-like NLS Q562C7-0 |
| 832 | Amino Acid | Ty1-like NLS Q566R3-0 |
| 833 | Amino Acid | Ty1-like NLS Q566R3-1 |
| 834 | Amino Acid | Ty1-like NLS Q566R3-2 |
| 835 | Amino Acid | Ty1-like NLS Q58A65-0 |
| 836 | Amino Acid | Ty1-like NLS Q5NBX1-0 |
| 837 | Amino Acid | Ty1-like NLS Q5XG71-0 |
| 838 | Amino Acid | Ty1-like NLS Q5XI01-0 |
| 839 | Amino Acid | Ty1-like NLS Q5XIB5-0 |
| 840 | Amino Acid | Ty1-like NLS Q5XIR6-0 |
| 841 | Amino Acid | Ty1-like NLS Q60848-0 |
| 842 | Amino Acid | Ty1-like NLS Q62018-0 |
| 843 | Amino Acid | Ty1-like NLS Q62018-1 |
| 844 | Amino Acid | Ty1-like NLS Q62187-0 |
| 845 | Amino Acid | Ty1-like NLS Q62871-0 |
| 846 | Amino Acid | Ty1-like NLS Q63520-0 |
| 847 | Amino Acid | Ty1-like NLS Q642C0-0 |
| 848 | Amino Acid | Ty1-like NLS Q68SB1-0 |
| 849 | Amino Acid | Ty1-like NLS Q6AYK5-0 |
| 850 | Amino Acid | Ty1-like NLS Q6NZB0-0 |
| 851 | Amino Acid | Ty1-like NLS Q76KJ5-0 |
| 852 | Amino Acid | Ty1-like NLS Q76KJ5-1 |
| 853 | Amino Acid | Ty1-like NLS Q76KJ5-2 |
| 854 | Amino Acid | Ty1-like NLS Q78WZ7-0 |
| 855 | Amino Acid | Ty1-like NLS Q78WZ7-1 |
| 856 | Amino Acid | Ty1-like NLS Q7TNB4-0 |
| 857 | Amino Acid | Ty1-like NLS Q7TPV4-0 |
| 858 | Amino Acid | Ty1-like NLS Q80WC1-0 |
| 859 | Amino Acid | Ty1-like NLS Q80Z37-0 |
| 860 | Amino Acid | Ty1-like NLS Q811R2-0 |
| 861 | Amino Acid | Ty1-like NLS Q8BKA3-0 |
| 862 | Amino Acid | Ty1-like NLS Q8CJ67-0 |
| 863 | Amino Acid | Ty1-like NLS Q8K214-0 |
| 864 | Amino Acid | Ty1-like NLS Q8K4T4-0 |
| 865 | Amino Acid | Ty1-like NLS Q8R5F3-0 |
| 866 | Amino Acid | Ty1-like NLS Q91X13-0 |
| 867 | Amino Acid | Ty1-like NLS Q9CS72-0 |
| 868 | Amino Acid | Ty1-like NLS Q9CVI2-0 |
| 869 | Amino Acid | Ty1-like NLS Q9CWX9-0 |
| 870 | Amino Acid | Ty1-like NLS Q9CZX5-0 |
| 871 | Amino Acid | Ty1-like NLS Q9DU3-0 |
| 872 | Amino Acid | Ty1-like NLS Q9D3V1-0 |
| 873 | Amino Acid | Ty1-like NLS Q9DBQ9-0 |
| 874 | Amino Acid | Ty1-like NLS Q9JIX5-0 |
| 875 | Amino Acid | Ty1-like NLS Q9JJ80-0 |
| 876 | Amino Acid | Ty1-like NLS Q9JJ89-0 |
| 877 | Amino Acid | Ty1-like NLS Q9R1C7-0 |
| 878 | Amino Acid | Ty1-like NLS Q9R1X4-0 |
| 879 | Amino Acid | Ty1-like NLS Q9Z180-0 |
| 880 | Amino Acid | Ty1-like NLS Q9Z207-0 |
| 881 | Amino Acid | Ty1-like NLS Q9Z2D6-0 |
| 882 | Amino Acid | Ty1-like NLS A0A1L8GSA2-0 |
| 883 | Amino Acid | Ty1-like NLS A0JP82-0 |
| 884 | Amino Acid | Ty1-like NLS A1A5I1-0 |
| 885 | Amino Acid | Ty1-like NLS A1L2T6-0 |
| 886 | Amino Acid | Ty1-like NLS A2RUV0-0 |
| 887 | Amino Acid | Ty1-like NLS A9JRD8-0 |
| 888 | Amino Acid | Ty1-like NLS E7F568-0 |
| 889 | Amino Acid | Ty1-like NLS F1QFU0-0 |
| 890 | Amino Acid | Ty1-like NLS F1QWK4-0 |
| 891 | Amino Acid | Ty1-like NLS K9JHZ4-0 |
| 892 | Amino Acid | Ty1-like NLS P07193-0 |
| 893 | Amino Acid | Ty1-like NLS P0CB65-0 |
| 894 | Amino Acid | Ty1-like NLS P12957-0 |
| 895 | Amino Acid | Ty1-like NLS P13505-0 |
| 896 | Amino Acid | Ty1-like NLS P21783-0 |
| 897 | Amino Acid | Ty1-like NLS Q28BS0-0 |
| 898 | Amino Acid | Ty1-like NLS Q28BS0-1 |
| 899 | Amino Acid | Ty1-like NLS Q28G05-0 |
| 900 | Amino Acid | Ty1-like NLS Q32N87-0 |
| 901 | Amino Acid | Ty1-like NLS Q3KPW4-0 |
| 902 | Amino Acid | Ty1-like NLS Q4QR29-0 |
| 903 | Amino Acid | Ty1-like NLS Q4QR29-1 |
| 904 | Amino Acid | Ty1-like NLS Q5BL56-0 |
| 905 | Amino Acid | Ty1-like NLS Q5XJK9-0 |
| 906 | Amino Acid | Ty1-like NLS Q5ZIJ0-0 |
| 907 | Amino Acid | Ty1-like NLS Q64OI9-0 |
| 908 | Amino Acid | Ty1-like NLS Q6DEU9-0 |
| 909 | Amino Acid | Ty1-like NLS Q6DEU9-1 |
| 910 | Amino Acid | Ty1-like NLS Q6DEU9-2 |
| 911 | Amino Acid | Ty1-like NLS Q6DK85-0 |
| 912 | Amino Acid | Ty1-like NLS Q6DRI7-0 |
| 913 | Amino Acid | Ty1-like NLS Q6DRL5-0 |
| 914 | Amino Acid | Ty1-like NLS Q6NV26-0 |
| 915 | Amino Acid | Ty1-like NLS Q6NWI1-0 |
| 916 | Amino Acid | Ty1-like NLS Q6NYJ3-0 |
| 917 | Amino Acid | Ty1-like NLS Q6P4K1-0 |
| 918 | Amino Acid | Ty1-like NLS Q6WKW9-0 |
| 919 | Amino Acid | Ty1-like NLS Q7ZUF2-0 |
| 920 | Amino Acid | Ty1-like NLS Q7ZW47-0 |
| 921 | Amino Acid | Ty1-like NLS Q7ZXZ0-0 |
| 922 | Amino Acid | Ty1-like NLS Q7ZXZ0-1 |
| 923 | Amino Acid | Ty1-like NLS Q7ZYR8-0 |
| 924 | Amino Acid | Ty1-like NLS Q8AVQ6-0 |
| 925 | Amino Acid | Ty1-like NLS Q9DE07-0 |
| 926 | Amino Acid | Ty1-like NLS P03086-0 |
| 927 | Amino Acid | Ty1-like NLS P09814-0 |
| 928 | Amino Acid | Ty1-like NLS P0CK10-0 |
| 929 | Amino Acid | Ty1-like NLS P15075-0 |
| 930 | Amino Acid | Ty1-like NLS P51724-0 |
| 931 | Amino Acid | Ty1-like NLS P52344-0 |
| 932 | Amino Acid | Ty1-like NLS P52531-0 |
| 933 | Amino Acid | Ty1-like NLS Q5UP41-0 |
| 934 | Amino Acid | Ty1-like NLS Q9DUC0-0 |
| 935 | Amino Acid | Ty1-like NLS Q9XJS3-0 |

### EXPERIMENTAL EXAMPLES

[0357] The invention is further described in detail by reference to the following experimental examples. These examples are provided for purposes of illustration only and are not intended to be limiting unless otherwise specified. Thus, the invention should in no way be construed as being limited to the following examples, but rather, should be construed to encompass any and all variations which become evident as a result of the teaching provided herein.

[0358] Without further description, it is believed that one of ordinary skill in the art can, using the preceding description and the following illustrative examples, make and utilize the present invention and practice the claimed methods. The following working examples therefore, specifically point out certain embodiments of the present invention, and are not to be construed as limiting in any way the remainder of the disclosure.

### Example 1: Targeted Destruction of Coronavirus RNA by CRISPR-Cas13 Delivered with Integration Deficient Lentiviral Vectors

[0359] The data presented herein demonstrate the efficacy of using RNA-targeting CRISPR-Cas13 platforms as an approach to 1) identify effective CRISPR-guide RNAs targeting essential and conserved coronavirus RNA sequences, 2) identify the most robust guide-RNA and CRISPR-Cas13 platforms for robust coronavirus RNA cleavage, and 3), harness non-integrating lentiviral vectors pseudotyped with coronavirus Spike protein. These experiments represent a major first step toward the development of a novel targeted therapeutic for treating coronavirus infections. Notably, the rapid programmability and delivery of this approach could be adapted to target diverse coronavirus strains or other infectious RNA viruses, such as influenza.

[0360] Coronavirus Lifecycle

[0361] Coronavirus genomes are encoded by a large (˜30 kb), single-stranded mRNA, which is capped and polyadenylated, allowing for translation by host proteins. Coronavirus genomes replicate entirely through RNA intermediates, generating both full-length genomic mRNA and nested subgenomic mRNAs, allowing for expression of numerous viral proteins.

[0362] Targeting

[0363] As a result of coronavirus replication and transcription, 5′ sequences (Leader) and 3′ sequences (S2M or Nucleocapsid ORF) are common to genomic and all subgenomic RNAs (FIG. 1). These sequences provide the opportunity for design of guide-RNAs which have the capacity for broad efficacy. Tiling CRISPR RNAs (crRNAs) are tested in cell-based luciferase reporter assays using a luciferase reporter mRNA containing coronavirus target sequences in 5′ UTR or 3′UTR regions.

[0364] Cleavage

[0365] RNA cleavage efficacy and specificity of coronavirus target sequences are determined in the above assays utilizing novel CRISPR-Cas13 systems (eraseR platforms), with enhanced guide-RNA expression constructs and/or CRISPR arrays (FIG. 2).

[0366] Delivery

[0367] Lentiviral vectors are enveloped and can be pseudotyped with different viral envelope proteins to alter viral tropism (FIG. 3). The efficacy and stability of lentiviral vectors pseudotyped with coronavirus envelope spike protein to transduce ACE2-expressing cell types is determined. Nonintegrating, 3rd generation lentiviral vectors, produced using catalytically inactive Integrase, offer a safe and transient expression approach for viral RNA clearance, without permanent expression.

[0368] Lentiviral constructs encoding CRISPR-Cas13 components can be packaged into non-integrating lentiviral particles pseudotyped with viral envelope proteins. For example, the lentiviral particle can be pseudotyped with the Spike glycoprotein from SARS-CoV-2 coronavirus, which provides specificity for entry into ACE2 receptor expressing cells. (FIG. 4B). This allows for specific targeting of ‘coronavirus-targeted’ cell types. Post-transduction, the processing and formation of non-integrating lentiviral episomes allows for transient expression of CRISPR-Cas13 components for acute targeted degradation of CoV genomic and subgenomic viral mRNAs (FIG. 4C).

[0369] A Luciferase reporter containing the SARS-2-CoV S2M sequence was used. (FIG. 7A). Seven crRNAs were designed targeting the CoV leader sequence. (FIG. 7B). Cell-based luciferase assays demonstrate robust knockdown of CoV Leader Luc reporter activity in cells with crRNAs targeting SARS-CoV-2 leader sequence (crRNAs A through G) or Luciferase coding sequence (Luc), relative to a non-targeting crRNA (FIG. 7C).

[0370] Additionally, a Luciferase reporter containing the SARS-2-CoV S2M sequence was used. (FIG. 8A). Six crRNAs were designed targeting the SARS-2-CoV S2M sequence. (FIG. 8B). Cell-based luciferase assays demonstrate robust knockdown of CoV S2M Luc reporter activity in cells with crRNAs targeting SARS-CoV-2 S2M sequence (crRNAs A through F) or Luciferase coding sequence (Luc), relative to a non-targeting crRNA (FIG. 8C).

### Example 2: One-Step Directional Assembly of CRISPR-Cas13 crRNA Arrays

[0371] The data provided herein demonstrates the design and validation of an approach to generate crRNA arrays by direct ligation of multiple annealed oligo pairs containing nucleotide substitutions within DR sequences (FIG. 9D). This rapid assembly approach was used to efficiently generate tandem ordered arrays for 3 spacer sequences, which notably, do not contain poly T stretches within the DR sequence, thereby promoting full-length array transcription. Given other potential nucleotide substitutions in these positions, arrays of up to 7 crRNAs lacking a DR T stretch could be assembled in a single-step, or arrays up to 8 crRNAs if a DR T stretch is included (FIG. 9E).

[0372] CRISPR-Cas13 guide RNAs occur naturally in bacterial species in tandem arrays, which are subsequently processed into single guides by Cas13-mediated cleavage (FIG. 9A). This cleavage activity is separable from target RNA cleavage activity, thus ‘catalytically dead’ (dCas13) retains this crRNA processing ability. Many CRISPR-Cas13 direct repeats contain poly T sequences of 4-5 nucleotides which have the potential to inhibit single or tandem full-length crRNA expression from commonly used Pol III promoters, such as hU6, in mammalian cells (FIG. 9B). Crystallography studies have revealed that the poly T stretches occur in the loop region of the direct repeat (DR), and that at least one T nucleotide projects into space, suggesting it doesn't play an important role in CRISPR-Cas13 binding or cleavage. As shown herein, mutation of two positions within this T stretch, T17C or T18C, does not inhibit dCas13 or Cas13-mediated activity. Thus, these changes can be harnessed to generate diversity within the DR sequence to allow for multiplex, directional cloning.

[0373] Mammalian guide-RNA expression cassettes are generally created by cloning annealed oligonucleotides comprising the spacer sequence into a cassette comprised of a mammalian Pol III promoter, a Direct Repeat and a terminator of 6 or more Ts (FIG. 9C). Commonly, multiple guide-RNAs are expressed by adding addition Pol III promoter cassettes, however this can significantly increase the complexity and size of the vector. Generation of tandem crRNA arrays would significantly decrease the size requirements of the vector; however, nucleotide synthesis of long arrays is prohibited due to size and the repeat nature of DR sequences.

### Example 3: Enhanced Knockdown of SARS-CoV-2 Viral Sequences with a CRISPR crRNA Array

[0374] Example 4 demonstrates the design and validation of CRISPR guide-RNAs capable of robust knockdown of a luciferase reporter encoding SARS-CoV-2 viral sequences. Example 5 demonstrates the development of a cloning strategy for the directional assembly of tandem crRNA arrays, which take advantage of base substitutions in non-essential residues within the loop region of Cas13b Direct Repeat (FIG. 9E and FIG. 10A). The data presented herein demonstrates that all possible base mutations within these two loop residues (T17 and T18) do not negatively affect guide RNA targeting and knockdown of a luciferase reporter mRNA for two independent guide RNAs targeting luciferase coding sequence (Luc-a and Luc-b) (FIG. 10B).

[0375] Lentiviral gene transfer vectors encoding CRISPR-Cas13 with single or triple crRNA arrays targeting SARS-CoV-2 viral sequences were developed. (FIG. 11A). A luciferase reporter was constructed containing Leader and N protein SARS-CoV-2 viral target sequences, encoded in both the 5′ and 3′ UTR regions of a Luciferase reporter mRNA (FIG. 11B). The data presented herein shows that expression of multiple guide-RNAs from a single promoter, encoded in a lentiviral transfer vector, results in greater luciferase activity knockdown compared with expression of a single guide RNA (FIG. 11C). These results demonstrate greater efficacy for using multiple guide-RNAs targeting a single viral genome, with the added benefit that multiple guide RNAs may further prevent viral ‘escape,’ which may occur through random mutagenesis or by therapeutic selection.

Additionally, the CRISPR-Cas13 expression cassette encoding the tripe guide array is small enough to be packaged within an AAV vector, which may be a useful alternative viral gene therapy delivery method (FIG. 12).

### Example 4: Targeting Influenza Virus Subtypes with CRISPR-Cas13

[0376] Examples 4 and 6 demonstrate that CRISPR-Cas13 can efficiently knockdown the expression of a luciferase reporter encoding coronavirus SARS-CoV-2 viral sequences. Based on the replication characteristics, single guide RNAs can be designed to target all coronavirus genomic and subgenomic RNAs. Additionally, expression of multiple guide RNAs in an array, expressed from a single promoter, resulted in enhanced viral reporter knockdown.

[0377] Similar to coronavirus, Influenza viruses are enveloped, RNA viruses which infect both animals and humans and have significant potential for becoming global pandemics. In contrast to coronavirus, influenza virus is composed of 8 independent viral RNA segments, which localize and replicate within the vertebrate nucleus (FIG. 13A). Viral RNA (vRNA) segments encode at least 10 proteins, which encode viral replication enzymes, structural proteins and envelope glycoproteins required for host cell binding and fusion. The multi-segment viral RNA genome allows for rapid mutation and viral selection; as viral segments can be readily switched between viral subtypes within infected cells. This has led to a diverse number of Influenza subtypes, which are categorized by envelope proteins Hemagglutinin (HA) and Neuraminidase (NA). These features present a unique challenge for the targeted degradation of Influenza viral RNA by CRISPR-Cas13.

[0378] The data presented herein presents the design of crRNAs which could target the 4 major Influenza A viral subtypes which have cause significant human disease in the recent past, and retain significant potential for becoming global pandemics (H1N1, H2N2, H3N2 and H7N9). Using multiple sequence alignment of viral protein coding sequences across these four subtypes, conserved segments were identified for five of the 8 viral segments (Table 2). Large conserved viral sequences across subtypes for HA and NA genes were not identified, consistent with their rapid evolution which enables evasion to host immunity. For these five regions, guide RNAs were designed to target either the negative-sense viral RNA (vRNA) or positive-sense viral protein coding mRNA. Guide-RNA arrays were designed to express all five crRNAs from a single Pol III promoter.

[0379] Encoding CRISPR guide arrays and Cas13 expression cassettes within a lentiviral gene transfer vector (or alternative gene therapy vector, such as AAV), would allow for the generation of a single particle for delivery and expression of CRISPR-Cas13 components to vertebrate cells (FIG. 14). Pseudotyping lentiviral vectors with NA and HA envelope proteins could be utilized to target specific cell types infected by Influenza virus, such as airway epithelia.

TABLE 2
Sequence alignment and identification of conserved coding sequences among
Influenza A Segments from H1N1, H2N2, H3N2, H7N9.

SEQ
ID NO

SEGMENT 1

| | | |
|---|---|---|
| H1N1 | GTGTTGGTAATGAAACGAAAACGGGACTCTAGCATACTTACTGACAGCCAGACAGCGACC 2253 | 225 |
| H3N2 | GTGTTGGTAATGAAACGAAAACGGGACTCTAGCATACTTACTGACAGCCAGACAGCGACC 2280 | 226 |
| H7N9 | GTGTTGGTGATGAAACGGAAACGGGACTCTAGCATACTTACTGACAGTCAGACAGCGACC 2253 | 227 |
| H2N2 | GTGTTGGTAATGAAACGAAAACGGGACTCTAGCATACTTACTGACAGCCAGACAGCGACC 2280 | 228 |
| | ********.********.***************************** ************ | |

SEGMENT 2

| | | |
|---|---|---|
| H1N1 | GGACGGATCAAGAAAGAAGAGTTCTCTGAGATCATGAAGATCTGTTCCACCATTGAAGAA 2256 | 229 |
| H3N2 | GGACGGATTAAGAAGGAAGAGTTCTCTGAGATCATGAAGATCTGTTCCACCATTGAAGAA 2280 | 230 |
| H7N9 | GGAAGGATTAAGAAAGAAGAGTTTGCTGAGATCATGAAGATCTGTTCCACCATTGAAGAG 2256 | 231 |
| H2N2 | GGACGGATTAAGAAAGAGGAGTTCGCTGAGATCATGAAGATCTGTTCCACCATTGAAGAG 2280 | 232 |
| | ***.**** *****.**.***** **********************************. | |

SEGMENT 3

| | | |
|---|---|---|
| H1N1 | AATCGAGGAGTGCCTGATTAATGATCCCTGGGTTTTGCTTAATGCATCTTGGTTCAACTCC 2335 | 233 |
| H3N2 | AATTGAGGAGTGCCTGATTAATGATCCCTGGGTTTTGCTCAATGCATCTTGGTTCAACTCC 2160 | 234 |
| H7N9 | AATCGAGGAGTGCCTGATTAATGATCCCTGGGTTTTGCTTAATGCATCTTGGTTCAACTCC 2136 | 235 |
| H2N2 | AATTGAGGAGTGCCTGATTAATGATCCCTGGGTTTTGCTTAATGCGTCTTGGTTCAACTCC 2160 | 236 |
| | *** *********************************** *****.*************** | |

SEGMENT 5

| | | |
|---|---|---|
| H1N1 | TTGACATGAGTAATGAAGGGTCTTATTTCTTCGGAGACAATGCAGAGGAGTATGACAGTT 1476 | 237 |
| H3N2 | TTGATATGAGTAATGAAGGATCTTATTTCTTCGGAGACAATGCAGAAGAGTACGACAATT 1540 | 238 |
| H7N9 | TTGACATGAATAATGAAGGATCTTATTTCTTCGGAGACAATGCAGAGGAGTATGACAATT 1486 | 239 |
| H2N2 | TTGACATGAGTAATGAAGGATCTTATTTCTTCGGAGACAATGCAGAGGAGTACGACAATT 1477 | 240 |
| | **** ****.*********.**************************.***** ****.** | |

SEGMENT 7

| | | |
|---|---|---|
| H1N1 | TTCTATCATCCCGTCAGGCCCCCTCAAAGCCGAGATCGCGCAGAGACTGGAAAGTGTCTT 95 | 241 |
| H3N2 | CTCTATCGTTCCATCAGGCCCCCTCAAAGCCGAGATCGCGCAGAGACTTGAAGATGTCTT 120 | 242 |
| H7N9 | CTCTATCATTCCATCAGGCCCCCTCAAAGCCGAGATCGCACAGAGACTTGAGGATGTTTT 95 | 243 |
| H2N2 | CTCTATCGTCCCGTCAGGCCCCCTCAAAGCCGAGATCGCACAGAGACTTGAAGATGTCTT 120 | 244 |
| | ******.* **.************************** ********.**...*** ** | |

[0380] The disclosures of each and every patent, patent application, and publication cited herein are hereby incorporated herein by reference in their entirety. While this invention has been disclosed with reference to specific embodiments, it is apparent that other embodiments and variations of this invention may be devised by others skilled in the art without departing from the true spirit and scope of the invention. The appended claims are intended to be construed to include all such embodiments and equivalent variations.

What is claimed is:

1. A tandem array comprising at least two CRISPR RNA (crRNA), wherein each crRNA comprises a guide sequence and a direct repeat (DR) sequence.

2. The tandem array of claim 1, wherein each guide sequence in the tandem array is different.

3. The tandem array of claim 1 or claim 2, wherein each DR sequence in the tandem array is different.

4. The tandem array of any of claims 1-3, wherein each DR sequence comprises a nucleotide mutation within the loop region of the DR sequence.

5. The tandem array of any of claims 1-4, wherein each DR sequence comprises a T17 or T18 nucleotide mutation.

6. The tandem array of any of claims 1-5, wherein each crRNA comprises a DR sequence independently selected from SEQ ID NOs: 265-274.

7. The tandem array of any of claims 1-6, DR sequence is 3′ from the guide sequence.

8. The tandem array of any of claims 1-7, wherein each guide sequence is independently substantially complementary to a Coronavirus genomic mRNA sequence or a Coronavirus subgenomic mRNA sequence.

9. The tandem array of claim 8, wherein each guide sequence is substantially complementary to a Coronavirus leader sequence, Coronavirus S sequence, Coronavirus E sequence, Coronavirus M sequence, N sequence, or Coronavirus S2M sequence.

10. The tandem array of claim 8 or 9, wherein each guide sequence is independently substantially complementary to a sequence at least 80% homologous to a sequence selected from SEQ ID NOs: 168-174, 176-181, 186, and 187.

11. The tandem array of any of claims 8-10, wherein each guide sequence comprises a sequence at least 80% homologous to a sequence selected from SEQ ID NOs: 189-224.

12. The tandem array of any of claims 8-11, wherein the tandem array comprises a sequence at least 80% homologous to SEQ ID NO:275.

13. The tandem array of any of claims 1-7, wherein each guide sequence is independently substantially complementary to an influenza virus genomic RNA sequence or an influenza virus subgenomic RNA sequence.

14. The tandem array of claim 13, wherein each guide sequence is substantially complementary to an influenza virus PB2 sequence, influenza virus PB1 sequence, influenza virus PA sequence, influenza virus NP sequence, or influenza virus M sequence.

15. The tandem array of claim 13 or 14, wherein each guide sequence is independently substantially complementary to a sequence at least 80% homologous to a sequence selected from SEQ ID NOs: 225-244.

16. The tandem array of any of claims 13-15, wherein each guide sequence comprises a sequence at least 80% homologous to a sequence selected from SEQ ID NOs: 245-249.

17. The tandem array of any of claims 8-11, wherein the tandem array comprises a sequence at least 80% homologous to a sequence selected from SEQ ID NO:276-279.

18. A composition comprising a tandem array of any of claims 1-17.

19. The composition of claim 18, composition further comprises a Cas protein.

20. The composition of claim 19, wherein the Cas protein is Cas13

21. The composition of claim 18 or claim 19, wherein the Cas protein comprises a sequence at least 80% identical to a sequence selected from SEQ ID NOs:1-47.

22. The composition of any of claims 18-21, wherein the Cas protein further comprises a localization signal or export signal

23. The composition of claim 22, wherein the Cas protein comprises an NES, wherein the NES comprises a sequence at least 80% identical to SEQ ID NO:58-59.

24. The composition of claim 22, wherein the Cas protein comprises a nuclear localization signal (NLS), wherein the NLS comprises a sequence at least 80% identical to SEQ ID NO: 50-57 and 323-935.

25. The composition of claim 22, wherein the Cas protein comprises a localization signal, wherein the localization signal comprises a sequence at least 80% identical to SEQ ID NO: 60-66.

26. A method of generating a tandem array comprising at least two CRISPR RNA (crRNA), wherein each crRNA comprises a guide sequence and a direct repeat (DR) sequence, the method comprising: ligating at least two the crRNA sequences, wherein each crRNA sequence comprises a unique DR sequence, wherein the ligation generates the tandem array.

27. A method of decreasing the number of two or more unique target RNA in a subject, the method comprising administering to the subject a tandem array of any of claims 1-17 and a Cas protein or nucleic acid encoding a Cas protein; or administering a composition of any of claims 18-25.

28. The method of claim 27, wherein the tandem array comprises at least two unique crRNA sequences which are substantially complementary to the target RNA sequences.

29. A method for treating a viral infection, the method comprising administering to the subject: (a) tandem array comprising at least two CRISPR RNA (crRNA), wherein each crRNA comprises a guide sequence substantially complementary to a viral RNA sequence and a direct repeat (DR) sequence; and (b) a Cas protein or nucleic acid encoding the Cas protein.

30. The method of claim 29, wherein the Cas protein is Cas13.

31. The method of claim 29 or 30, wherein the Cas protein comprises a sequence at least 80% identical to a sequence selected from SEQ ID NOs:1-47.

32. The method of any of claims 29-31, wherein the Cas protein further comprises a localization signal or export signal.

33. The method of claim 32, wherein the Cas protein comprises an NES, wherein the NES comprises a sequence at least 80% identical to SEQ ID NO:58-59.

34. The method of claim 32, wherein the Cas protein comprises a nuclear localization signal (NLS), wherein the NLS comprises a sequence at least 80% identical to SEQ ID NO: 50-57 and 323-935.

35. The method of claim 32, wherein the Cas protein comprises a localization signal, wherein the localization signal comprises a sequence at least 80% identical to SEQ ID NO: 60-66.

36. The method of any of claims 29-31 wherein the Cas protein comprises a sequence at least 80% identical to SEQ ID NOs: 68-100.

37. The method of any of claims 29-36, wherein the nucleic acid encoding the Cas protein comprises a sequence at least 80% identical to SEQ ID NOs:132-133.

38. The method of any of claims 29-36, wherein the nucleic acid encoding the Cas protein comprises a sequence at least 80% identical to SEQ ID NOs:147-166.

39. The method of any of claims 29-38, wherein the viral infection is a coronavirus infection and wherein each crRNA independently comprises a guide sequence substantially complementary to a Coronavirus genomic mRNA sequence or a Coronavirus subgenomic mRNA sequence.

40. The method of claim 39, wherein each crRNA independently comprises a guide sequence substantially complementary to a Coronavirus leader sequence, Coronavirus S sequence, Coronavirus E sequence, Coronavirus M sequence, N sequence, or Coronavirus S2M sequence.

41. The method of claim 39 or claim 40, wherein each crRNA independently comprises a guide sequence substantially complementary to a sequence at least at least 80% homologous to a sequence selected from SEQ ID NOs: 168-174, 176-181, 186, and 187.

42. The method of any of claims 39-41, wherein each crRNA independently comprises a guide sequence substantially at least 80% homologous to a sequence selected from SEQ ID NOs: 189-224.

43. The method of any of claims 39-42, wherein the tandem array comprises a sequence at least 80% homologous to SEQ ID NO: 275.

44. The method of any of claims 29-38, wherein the viral infection is an influenza infection and wherein each crRNA independently comprises a guide sequence substantially complementary to an influenza virus genomic RNA sequence or an influenza virus subgenomic RNA sequence.

45. The method of claim 44, wherein each crRNA independently comprises a guide sequence substantially complementary an influenza virus PB2 sequence, influenza virus PB1 sequence, influenza virus PA sequence, influenza virus NP sequence, or influenza virus M sequence.

46. The method of claim 44 or claim 45, wherein each crRNA independently comprises a guide sequence substantially complementary to a sequence at least at least 80% homologous to a sequence selected from SEQ ID NOs:225-244.

47. The method of any of claims 44-46, wherein each crRNA independently comprises a guide sequence substantially at least 80% homologous to a sequence selected from SEQ ID NOs: 245-264.

48. The method of any of claims 43-47, wherein the tandem array comprises a sequence at least 80% homologous to a sequence selected from SEQ ID NO: 276-279.

49. A delivery system comprising: a packaging plasmid a transfer plasmid, and an envelope plasmid, wherein the packaging plasmid comprises a nucleic acid sequence encoding a gag-pol polyprotein; the transfer plasmid comprises a nucleic acid sequence encoding a tandem array comprising at least two CRISPR RNA (crRNA), wherein each crRNA comprises a guide sequence and a direct repeat (DR) sequence and a nucleic acid sequence encoding a Cas protein; and the envelope plasmid comprises a nucleic acid sequence encoding an envelope protein.

50. The delivery system of claim 49, wherein the Cas protein comprises a sequence at least 80% identical to a sequence selected from SEQ ID NOs:1-47.

51. The delivery system of claim 49 or claim 50, wherein the Cas protein further comprises a localization signal or export signal.

52. The delivery system of claim 51, wherein the localization signal or export signal comprises a sequence 80% identical to a sequence selected from SEQ ID NOs:50-66 and 323-935.

53. The delivery system of any of claims 49-52, wherein the envelope protein is a coronavirus spike glycoprotein.

54. The delivery system of any of claims claim 49-53, wherein the envelope protein comprises a sequence at least 80% identical to a sequence selected from SEQ ID NO:101-129.

55. The delivery system of any of claims 49-54, wherein each crRNA independently comprises a guide sequence substantially complementary to a Coronavirus genomic mRNA sequence or a Coronavirus subgenomic mRNA sequence.

56. The delivery system of any of claims 49-55, wherein each crRNA independently comprises a guide sequence substantially complementary to a Coronavirus leader sequence, Coronavirus S sequence, Coronavirus E sequence, Coronavirus M sequence, N sequence, or Coronavirus S2M sequence.

57. The delivery system of any of claims 49-56, wherein each crRNA independently comprises a guide sequence substantially complementary to a sequence at least at least 80% homologous to a sequence selected from SEQ ID NOs: 168-174, 176-181, 186, and 187.

58. The delivery system of any of claims 49-57, wherein each crRNA independently comprises a guide sequence substantially at least 80% homologous to a sequence selected from SEQ ID NOs: 189-224.

59. The delivery system of any of claims 49-58, wherein the tandem array comprises a sequence at least 80% homologous to SEQ ID NO: 275.

60. The delivery system of any of claims 49-52, wherein each crRNA independently comprises a guide sequence substantially complementary to an influenza virus genomic RNA sequence or an influenza virus subgenomic RNA sequence.

61. The delivery system of any of claims 49-52 and 60, wherein each crRNA independently comprises a guide sequence substantially complementary an influenza virus PB2 sequence, influenza virus PB1 sequence, influenza virus PA sequence, influenza virus NP sequence, or influenza virus M sequence.

62. The delivery system of any of claims 49-52 and 60-61, wherein each crRNA independently comprises a guide sequence substantially complementary to a sequence at least at least 80% homologous to a sequence selected from SEQ ID NOs:225-244.

63. The delivery system of any of claims 49-52 and 60-62, wherein each crRNA independently comprises a guide sequence substantially at least 80% homologous to a sequence selected from SEQ ID NOs: 245-264.

64. The delivery system of any of claims 49-52 and 60-63, wherein the tandem array comprises a sequence at least 80% homologous to a sequence selected from SEQ ID NO: 276-279.

The application's sequence listing, which the Patent Office published only in electronic form, follows.

SEQUENCE LISTING (935 sequences)

SEQ ID NO: 1 - protein, 1089 aa, Artificial Sequence
  Chemically Synthesized
NIPALVENQKKYFGTYSVMAMLNAQTVLDHIQKVADIEGEQNENNENLWFHPVMSHLYNAKNGYDKQPEKTMFIIERLQSYFPFLKIMAENQREYSNGKYKQNRVEVNSNDIFEVLKRAFGVLKMYRDLTNHYKTYEEKLNDGCEFLTSTEQPLSGMINNYYTVALRNMNERYGYKTEDLAFIQDKRFKFVKDAYGKKKSQVNTGFFLSLQDYNGDTQKKLHLSGVGIALLICLFLDKQYINIFLSRLPIFSSYNAQSEERRIIIRSFGINSIKLPKDRIHSEKSNKSVAMDMLNEVKRCPDELFTTLSAEKQSRFRIISDDHNEVLMKRSSDRFVPLLLQYIDYGKLFDHIRFHVNMGKLRYLLKADKTCIDGQTRVRVIEQPLNGFGRLEEAETMRKQENGTFGNSGIRIRDFENMKRDDANPANYPYIVDTYTHYILENNKVEMFINDKEDSAPLLPVIEDDRYVVKTIPSCRMSTLEIPAMAFHMFLFGSKKTEKLIVDVHNRYKRLFQAMQKEEVTAENIASFGIAESDLPQKILDLISGNAHGKDVDAFIRLTVDDMLTDTERRIKRFKDDRKSIRSADNKMGKRGFKQISTGKLADFLAKDIVLFQPSVNDGENKITGLNYRIMQSAIAVYDSGDDYEAKQQFKLMFEKARLIGKGTTEPHPFLYKVFARSIPANAVEFYERYLIERKFYLTGLSNEIKKGNRVDVPFIRRDQNKWKTPAMKTLGRIYSEDLPVELPRQMFDNEIKSHLKSLPQMEGIDFNNANVTYLIAEYMKRVLDDDFQTFYQWNRNYRYMDMLKGEYDRKGSLQHCFTSVEEREGLWKERASRTERYRKQASNKIRSNRQMRNASSEEIETILDKRLSNSRNEYQKSEKVIRRYRVQDALLFLLAKKTLTELADFDGERFKLKEIMPDAEKGILSEIMPMSFTFEKGGKKYTITSEGMKLKNYGDFFVLASDKRIGNLLELVGSDIVSKEDIMEEFNKYDQCRPEISSIVFNLEKWAFDTYPELSARVDREEKVDFKSILKILLNNKNINKEQSDILRKIRNAFDHNNYPDKGVVEIKALPEIAMSIKKAFGEYAIMK

SEQ ID NO: 2 - protein, 982 aa, Artificial Sequence
  Chemically Synthesized
NIPALVENQKKYFGTYSVMAMLNAQTVLDHIQKVADIEGEQNENNENLWFHPVMSHLYNAKNGYDKQPEKTMFIIERLQSYFPFLKIMAENQREYSNGKYKQNRVEVNSNDIFEVLKRAFGVLKMYRDLTNHYKTYEEKLNDGCEFLTSTEQPLSGMINNYYTVALRNMNERYGYKTEDLAFIQDKRFKFVKDAYGKKKSQVNTGFFLSLQDYNGDTQKKLHLSGVGIALLICLFLDKQYINIFLSRLPIFSSYNAQSEERRIIIRSFGINSIKLPKDRIHSEKSNKSVAMDMLNEVKRCPDELFTTLSAEKQSRFRIISDDHNEVLMKRSSDRFVPLLLQYIDYGKLFDHIRFHVNMGKLRYLLKADKTCIDGQTRVRVIEQPLNGFGRLEEAETMRKQENGTFGNSGIRIRDFENMKRDDANPANYPYIVDTYTHYILENNKVEMFINDKEDSAPLLPVIEDDRYVVKTIPSCRMSTLEIPAMAFHMFLFGSKKTEKLIVDVHNRYKRLFQAMQKEEVTAENIASFGIAESDLPQKILDLISGNAHGKDVDAFIRLTVDDMLTDTERRIKRFKDDRKSIRSADNKMGKRGFKQISTGKLADFLAKDIVLFQPSVNDGENKITGLNYRIMQSAIAVYDSGDDYEAKQQFKLMFEKARLIGKGTTEPHPFLYKVFARSIPANAVEFYERYLIERKFYLTGLSNEIKKGNRVDVPFIRRDQNKWKTPAMKTLGRIYSEDLPVELPRQMFDNEIKSHLKSLPQMEGIDFNNANVTYLIAEYMKRVLDDDFQTFYQWNRNYRYMDMLKGEYDRKGSLQHCFTSVEEREGLWKERASRTERYRKQASNKIRSNRQMRNASSEEIETILDKRLSNSRNEYQKSEKVIRRYRVQDALLFLLAKKTLTELADFDGERFKLKEIMPDAEKGILSEIMPMSFTFEKGGKKYTITSEGMKLKNYGDFFVLASDKRIGNLLELVGSDIVSKED

SEQ ID NO: 3 - protein, 953 aa, Artificial Sequence
  Chemically Synthesized
MSNEIGAFREHQFAYAPGNEKQEEATFATYFNLALSNVEGMMFGEVESNPDKIEKSLDTLPPAILRQIASFIWLSKEDHPDKAYSTEEVKVIVTDLVRRLCFYRNYFSHCFYLDTQYFYSDELVDTTAIGEKLPYNFHHFITNRLFRYSLPEITLFRWNEGERKYEILRDGLIFFCCLFLKRGQAERFLNELRFFKRTDEEGRIKRTIFTKYCTRESHKHIGIEEQDFLIFQDIIGDLNRVPKVCDGVVDLSKENERYIKNRETSNESDENKARYRLLIREKDKFPYYLMRYIVDFGVLPCITFKQNDYSTKEGRGQFHYQDAAVAQEERCYNFVVRNGNVYYSYMPQAQNVVRISELQGTISVEELRNMVYASINGKDVNKSVEQYLYHLHLLYEKILTISGQTIKEGRVDVEDYRPLLDKLLLRPASNGEELRRELRKLLPKRVCDLLSNRFDCSEGVSAVEKRLKAILLRHEQLLLSQNPALHIDKIKSVIDYLYLFFSDDEKFRQQPTEKAHRGLKDEEFQMYHYLVGDYDSHPLALWKELEASGRLKPEMRKLTSATSLHGLYMLCLKGTVEWCRKQLMSIGKGTAKVEAIADRVGLKLYDKLKEYTPEQLEREVKLVVMHGYAAAATPKPKAQAAIPSKLTELRFYSFLGKREMSFAAFIRQDKKAQKLWLRNFYTVENIKTLQKRQAAADAACKKLYNLVGEVERVHTNDKVLVLVAQRYRERLLNVGSKCAVTLDNPERQQKLADVYEVQNAWLSIRFDDLDFTLTHVNLSNLRKAYNLIPRKHILAFKEYLDNRVKQKLCEECRNVRRKEDLCTCCSPRYSNLTSWLKENHSESSIEREAATMMLLDVERKLLSFLLDERRKAIIEYGKFIPFSALVKECRLADAGLCGIRNDVLHDNVISYADAIGKLSAYFPKEASEAVEYIRRTKEVREQRREELMANSSQ

SEQ ID NO: 4 - protein, 1111 aa, Artificial Sequence
  Chemically Synthesized
MKSGRREKAKSNKSSIVRVIISNFDDKQVKEIKVLYTKQGGIDVIKFKSTEKDEKGRMKFNFDCAYNRLEEEEFNSFGGKGKQSFFVTTNEDLTELHVTKRHKTTGEIIKDYTIQGKYTPIKQDRTKVTVSITDNKDHFDSNDLGDKIRLSRSLTQYTNRILLDADVMKNYREIVCSDSEKVDETINIDSQEIYKINRFLSYRSNMIIYYQMINNFLLHYDGEEDKGGNDSINLINEIWKYENKKNDEKEKIIERSYKSIEKSINQYILNHNTEVESGDKEKKIDISEERIKEDLKKTFILFSRLRHYMVHYNYKFYENLYSGKNFIIYNKDKSKSRRFSELLDLNIFKELSKIKLVKNRAVSNYLDKKTTIHVLNKNINAIKLLDIYRDICETKNGFNNFINNMMTISGEEDKEYKEMVTKHFNENMNKLSIYLENFKKHSDFKTNNKKKETYNLLKQELDEQKKLRLWFNAPYVYDIHSSKKYKELYVERKKYVDIHSKLIEAGINNDNKKKLNEINVKLCELNTEMKEMTKLNSKYRLQYKLQLAFGFILEEFNLDIDKFVSAFDKDNNLTISKFMEKRETYLSKSLDRRDNRFKKLIKDYKFRDTEDIFCSDRENNLVKLYILMYILLPVEIRGDFLGFVKKNYYDLKHVDFIDKRNNDNKDTFFHDLRLFEKNVKRLEVTSYSLSDGFLGKKSREKFGKELEKFIYKNVSIALPTNIDIKEFNKSLVLPMMKNYQIIFKLLNDIEISALFLIAKKEGNEGSITFKKVIDKVRKEDMNGNINFSQVMKMALNEKVNCQIRNSIAHINMKQLYIEPLNIYINNNQNKKTISEQMEEIIDICITKGLTGKELNKNIINDYYMKKEKLVFNLKLRKRNNLVSIDAQQKNMKEKSILNKYDLNYKDENLNIKEIILKVNDLNNKQKLLKETTEGESNYKNALSKDILLLNGIIRKNINFKIKEMILGIIQQNEYRYVNINIYDKIRKEDHNIDLKINNKYIEISCYENKSNESTDERINFKIKYMDLKVKNELLVPSCYEDIYIKKKIDLEIRYIENCKVVYIDIYYKKYNINLEFDGKTLFVKFNKDVKKNNQKVNLESNYIQNIKFIVS

SEQ ID NO: 5 - protein, 1276 aa, Artificial Sequence
  Chemically Synthesized
MKISKVDHVKSGIDQKLSSQRGMLYKQPQKKYEGKQLEEHVRNLSRKAKALYQVFPVSGNSKMEKELQIINSFIKNILLRLDSGKTSEEIVGYINTYSVASQISGDHIQELVDQHLKESLRKYTCVGDKRIYVPDIIVALLKSKFNSETLQYDNSELKILIDFIREDYLKEKQIKQIVHSIENNSTPLRIAEINGQKRLIPANVDNPKKSYIFEFLKEYAQSDPKGQESLLQHMRYLILLYLYGPDKITDDYCEEIEAWNFGSIVMDNEQLFSEEASMLIQDRIYVNQQIEEGRQSKDTAKVKKNKSKYRMLGDKIEHSINESVVKHYQEACKAVEEKDIPWIKYISDHVMSVYSSKNRVDLDKLSLPYLAKNTWNTWISFIAMKYVDMGKGVYHFAMSDVDKVGKQDNLIIGQIDPKFSDGISSFDYERIKAEDDLHRSMSGYIAFAVNNFARAICSDEFRKKNRKEDVLTVGLDEIPLYDNVKRKLLQYFGGASNWDDSIIDIIDDKDLVACIKENLYVARNVNFHFAGSEKVQKKQDDILEEIVRKETRDIGKHYRKVFYSNNVAVFYCDEDIIKLMNHLYQREKPYQAQIPSYNKVISKTYLPDLIFMLLKGKNRTKISDPSIMNMFRGTFYFLLKEIYYNDFLQASNLKEMFCEGLKNNVKNKKSEKPYQNFMRRFEELENMGMDFGEICQQIMTDYEQQNKQKKKTATAVMSEKDKKIRTLDNDTQKYKHFRTLLYIGLREAFIIYLKDEKNKEWYEFLREPVKREQPEEKEFVNKWKLNQYSDCSELILKDSLAAAWYVVAHFINQAQLNHLIGDIKNYIQFISDIDRRAKSTGNPVSESTEIQIERYRKILRVLEFAKFFCGQITNVLTDYYQDENDFSTHVGHYVKFEKKNMEPAHALQAFSNSLYACGKEKKKAGFYYDGMNPIVNRNITLASMYGNKKLLENAMNPVTEQDIRKYYSLMAELDSVLKNGAVCKSEDEQKNLRHFQNLKNRIELVDVLTLSELVNDLVAQLIGWVYIRERDMMYLQLGLHYIKLYFTDSVAEDSYLRTLDLEEGSIADGAVLYQIASLYSFNLPMYVKPNKSSVYCKKHVNSVATKFDIFEKEYCNGDETVIENGLRLFENINLHKDMVKFRDYLAHFKYFAKLDESILELYSKAYDFFFSYNIKLKKSVSYVLTNVLLSYFINAKLSFSTYKSSGNKTVQHRTTKISVVAQTDYFTYKLRSIVKNKNGVESIENDDRRCEVVNIAARDKEFVDEVCNVINYNSDK

SEQ ID NO: 6 - protein, 1224 aa, Artificial Sequence
  Chemically Synthesized
MENKTSLGNNIYYNPFKPQDKSYFAGYFNAAMENTDSVFRELGKRLKGKEYTSENFFDAIFKENISLVEYERYVKLLSDYFPMARLLDKKEVPIKERKENFKKNFKGIIKAVRDLRNFYTHKEHGEVEITDEIFGVLDEMLKSTVLTVKKKKVKTDKTKEILKKSIEKQLDILCQKKLEYLRDTARKIEEKRRNQRERGEKELVAPFKYSDKRDDLIAAIYNDAFDVYIDKKKDSLKESSKAKYNTKSDPQQEEGDLKIPISKNGVVFLLSLFLTKQEIHAFKSKIAGFKATVIDEATVSEATVSHGKNSICFMATHEIFSHLAYKKLKRKVRTAEINYGEAENAEQLSVYAKETLMMQMLDELSKVPDVVYQNLSEDVQKTFIEDWNEYLKENNGDVGTMEEEQVIHPVIRKRYEDKFNYFAIRFLDEFAQFPTLRFQVHLGNYLHDSRPKENLISDRRIKEKITVFGRLSELEHKKALFIKNTETNEDREHYWEIFPNPNYDFPKENISVNDKDFPIAGSILDREKQPVAGKIGIKVKLLNQQYVSEVDKAVKAHQLKQRKASKPSIQNIIEEIVPINESNPKEAIVFGGQPTAYLSMNDIHSILYEFFDKWEKKKEKLEKKGEKELRKEIGKELEKKIVGKIQAQIQQIIDKDTNAKILKPYQDGNSTAIDKEKLIKDLKQEQNILQKLKDEQTVREKEYNDFIAYQDKNREINKVRDRNHKQYLKDNLKRKYPEAPARKEVLYYREKGKVAVWLANDIKRFMPTDFKNEWKGEQHSLLQKSLAYYEQCKEELKNLLPEKVFQHLPFKLGGYFQQKYLYQFYTCYLDKRLEYISGLVQQAENFKSENKVFKKVENECFKFLKKQNYTHKELDARVQSILGYPIFLERGFMDEKPTIIKGKTFKGNEALFADWFRYYKEYQNFQTFYDTENYPLVELEKKQADRKRKTKIYQQKKNDVFTLLMAKHIFKSVFKQDSIDQFSLEDLYQSREERLGNQERARQTGERNTNYIWNKTVDLKLCDGKITVENVKLKNVGDFIKYEYDQRVQAFLKYEENIEWQAFLIKESKEEENYPYVVEREIEQYEKVRREELLKEVHLIEEYILEKVKDKEILKKGDNQNFKYYILNGLLKQLKNEDVESYKVFNLNTEPEDVNINQLKQEATDLEQKAFVLTYIRNKFAHNQLPKKEFWDYCQEKYGKIEKEKTYAEYFAEVFKKEKEALIK

SEQ ID NO: 7 - protein, 1385 aa, Artificial Sequence
  Chemically Synthesized
MKFSKVDHTRSAVGIQKATDSVHGMLYTDPKKQEVNDLDKRFDQLNVKAKRLYNVFNQSKAEEDDDEKRFGKVVKKLNRELKDLLFHREVSRYNSIGNAKYNYYGIKSNPEEIVSNLGMVESLKGERDPQKVISKLLLYYLRKGLKPGTDGLRMILEASCGLRKLSGDEKELKVFLQTLDEDFEKKTFKKNLIRSIENQNMAVQPSNEGDPIIGITQGRFNSQKNEEKSAIERMMSMYADLNEDHREDVLRKLRRLNVLYFNVDTEKTEEPTLPGEVDTNPVFEVWHDHEKGKENDRQFATFAKILTEDRETRKKEKLAVKEALNDLKSAIRDHNIMAYRCSIKVTEQDKDGLFFEDQRINRFWIHHIESAVERILASINPEKLYKLRIGYLGEKVWKDLLNYLSIKYIAVGKAVFHFAMEDLGKTGQDIELGKLSNSVSGGLTSFDYEQIRADETLQRQLSVEVAFAANNLFRAVVGQTGKKIEQSKSEENEEDFLLWKAEKIAESIKKEGEGNTLKSILQFFGGASSWDLNHFCAAYGNESSALGYETKFADDLRKAIYSLRNETFHFTTLNKGSFDWNAKLIGDMFSHEAATGIAVERTRFYSNNLPMFYRESDLKRIMDHLYNTYHPRASQVPSFNSVFVRKNFRLFLSNTLNTNTSFDTEVYQKWESGVYYLFKEIYYNSFLPSGDAHHLFFEGLRRIRKEADNLPIVGKEAKKRNAVQDFGRRCDELKNLSLSAICQMIMTEYNEQNNGNRKVKSTREDKRKPDIFQHYKMLLLRTLQEAFAIYIRREEFKFIFDLPKTLYVMKPVEEFLPNWKSGMFDSLVERVKQSPDLQRWYVLCKFLNGRLLNQLSGVIRSYIQFAGDIQRRAKANHNRLYMDNTQRVEYYSNVLEVVDFCIKGTSRFSNVFSDYFRDEDAYADYLDNYLQFKDEKIAEVSSFAALKTFCNEEEVKAGIYMDGENPVMQRNIVMAKLFGPDEVLKNVVPKVTREEIEEYYQLEKQIAPYRQNGYCKSEEDQKKLLRFQRIKNRVEFQTITEFSEIINELLGQLISWSFLRERDLLYFQLGFHYLCLHNDTEKPAEYKEISREDGTVIRNAILHQVAAMYVGGLPVYTLADKKLAAFEKGEADCKLSISKDTAGAGKKIKDFFRYSKYVLIKDRMLTDQNQKYTIYLAGLELFENTDEHDNITDVRKYVDHFKYYATSDENAMSILDLYSEIHDRFFTYDMKYQKNVANMLENILLRHFVLIRPEFFTGSKKVGEGKKITCKARAQIEIAENGMRSEDFTYKLSDGKKNISTCMIAARDQKYLNTVARLLYYPHEAKKSIVDTREKKNNKKTNRGDGTFNKQKGTARKEKDNGPREFNDTGFSNTPFAGFDPFRNS

SEQ ID NO: 8 - protein, 1199 aa, Artificial Sequence
  Chemically Synthesized
MKNIQRLGKGNEFSPFKKEDKFYFGGFLNLANNNIEDFFKEIITRFGIVITDENKKPKETFGEKILNEIFKKDISIVDYEKWVNIFADYFPFTKYLSLYLEEMQFKNRVICFRDVMKELLKTVEALRNFYTHYDHEPIKIEDRVFYFLDKVLLDVSLTVKNKYLKTDKTKEFLNQHIGEELKELCKQRKDYLVGKGKRIDKESEIINGIYNNAFKDFICKREKQDDKENHNSVEKILCNKEPQNKKQKSSATVWELCSKSSSKYTEKSFPNRENDKHCLEVPISQKGIVFLLSFFLNKGEIYALTSNIKGFKAKITKEEPVTYDKNSIRYMATHRMFSFLAYKGLKRKIRTSEINYNEDGQASSTYEKETLMLQMLDELNKVPDVVYQNLSEDVQKTFIEDWNEYLKENNGDVGTMEEEQVIHPVIRKRYEDKFNYFAIRFLDEFAQFPTLRFQVHLGNYLCDKRTKQICDTTTEREVKKKITVFGRLSELENKKAIFLNEREEIKGWEVFPNPSYDFPKENISVNYKDFPIVGSILDREKQPVSNKIGIRVKIADELQREIDKAIKEKKLRNPKNRKANQDEKQKERLVNEIVSTNSNEQGEPVVFIGQPTAYLSMNDIHSVLYEFLINKISGEALETKIVEKIETQIKQIIGKDATTKILKPYTNANSNSINREKLLRDLEQEQQILKTLLEEQQQREKDKKDKKSKRKHELYPSEKGKVAVWLANDIKRFMPKAFKEQWRGYHHSLLQKYLAYYEQSKEELKNLLPKEVFKHFPFKLKGYFQQQYLNQFYTDYLKRRLSYVNELLLNIQNFKNDKDALKATEKECFKFFRKQNYIINPINIQIQSILVYPIFLKRGFLDEKPTMIDREKFKENKDTELADWFMHYKNYKEDNYQKFYAYPLEKVEEKEKFKRNKQINKQKKNDVYTLMMVEYIIQKIFGDKFVEENPLVLKGIFQSKAERQQNNTHAATTQERNLNGILNQPKDIKIQGKITVKGVKLKDIGNFRKYEIDQRVNTFLDYEPRKEWMAYLPNDWKEKEKQGQLPPNNVIDRQISKYETVRSKILLKDVQELEKIISDEIKEEHRHDLKQGKYYNFKYYILNGLLRQLKNENVENYKVFKLNTNPEKVNITQLKQEATDLEQKAFVLTYIRNKFAHNQLPKKEFWDYCQEKYGKIEKEKTYAEYFAEVFKREKEALIK

SEQ ID NO: 9 - protein, 1164 aa, Artificial Sequence
  Chemically Synthesized
MRMTKVKINGSPVSMNRSKLNGHLVWNGTTNTVNILTKKEQSFAASFLNKTLVKADQVKGYKVLAENIFIIFEQLEKSNSEKPSVYLNNIRRLKEAGLKRFFKSKYHEEIKYTSEKNQSVPTKLNLIPLFFNAVDRIQEDKFDEKNWSYFCKEMSPYLDYKKSYLNRKKEILANSIQQNRGFSMPTAEEPNLLSKRKQLFQQWAMKFQESPLIQQNNFAVEQFNKEFANKINELAAVYNVDELCTAITEKLMNFDKDKSNKTRNFEIKKLWKQHPHNKDKALIKLFNQEGNEALNQFNIELGKYFEHYFPKTGKKESAESYYLNPQTIIKTVGYQLRNAFVQYLLQVGKLHQYNKGVLDSQTLQEIGMYEGFQTKFMDACVFASSSLRNIIQATTNEDILTREKFKKELEKNVELKHDLFFKTEIVEERDENPAKKIAMTPNELDLWAIRGAVQRVRNQIFHQQINKRHEPNQLKVGSFENGDLGNVSYQKTIYQKLFDAEIKDIEIYFAEKIKSSGALEQYSMKDLEKLFSNKELTLSLGGQVVAFAPSYKKLYKQGYFYQNEKTIELEQFTDYDFSNDVFKANYYLIKLIYHYVFLPQFSQANNKLFKDTVHYVIQQNKELNTTEKDKKNNKKIRKYAFEQVKLMKNESPEKYMQYLQREMQEERTIKEAKKTNEEKPNYNFEKLLIQIFIKGFDTFLRNFDLNLNPAEELVGTVKEKAEGLRKRKERIAKILNVDEQIKTGDEEIAFWIFAKLLDARHLSELRNEMIKFKQSSVKKGLIKNGDLIEQMQPILELCILSNDSESMEKESFDKIEVFLEKVELAKNEPYMQEDKLTPVKFRFMKQLEKYQTRNFIENLVIENPEFKVSEKIVLNWHEEKEKIADLVDKRTKLHEEWASKAREIEEYNEKIKKNKSKKLDKPAEFAKFAEYKIICEAIENFNRLDHKVRLTYLKNLHYLMIDLMGRMVGFSVLFERDFVYMGRSYSALKKQSIYLNDYDTFANIRDWEVNENKHLFGTSSSDLTFQETAEFKNLKKPMENQLKALLGVTNHSFEIRNNIAHLHVLRNDGKGEGVSLLSCMNDLRKLMSYDRKLKNAVTKAIIKILDKHGMILKLTNNDHTKPFEIESLKPKKIIHLEKSNHSFPMDQVSQEYCDLVKKMLVFTN

SEQ ID NO: 10 - protein, 1175 aa, Artificial Sequence
  Chemically Synthesized
MRITKVKIKLDNKLYQVTMQKEEKYGTLKLNEESRKSTAEILRLKKASFNKSFHSKTINSQKENKNATIKKNGDYISQIFEKLVGVDTNKNIRKPKMSLTDLKDLPKKDLALFIKRKFKNDDIVEIKNLDLISLFYNALQKVPGEHFTDESWADFCQEMMPYREYKNKFIERKIILLANSIEQNKGFSINPETFSKRKRVLHQWAIEVQERGDFSILDEKLSKLAEIYNFKKMCKRVQDELNDLEKSMKKGKNPEKEKEAYKKQKNFKIKTIWKDYPYKTHIGLIEKIKENEELNQFNIEIGKYFEHYFPIKKERCTEDEPYYLNSETIATTVNYQLKNALISYLMQIGKYKQFGLENQVLDSKKLQEIGIYEGFQTKFMDACVFATSSLKNIIEPMRSGDILGKREFKEAIATSSFVNYHHFFPYFPFELKGMKDRESELIPFGEQTEAKQMQNIWALRGSVQQIRNEIFHSFDKNQKFNLPQLDKSNFEFDASENSTGKSQSYIETDYKFLFEAEKNQLEQFFIERIKSSGALEYYPLKSLEKLFAKKEMKFSLGSQVVAFAPSYKKLVKKGHSYQTATEGTANYLGLSYYNRYELKEESFQAQYYLLKLIYQYVFLPNFSQGNSPAFRETVKAILRINKDEARKKMKKNKKFLRKYAFEQVREMEFKETPDQYMSYLQSEMREEKVRKAEKNDKGFEKNITMNFEKLLMQIFVKGFDVFLTTFAGKELLLSSEEKVIKETEISLSKKINEREKTLKASIQVEHQLVATNSAISYWLFCKLLDSRHLNELRNEMIKFKQSRIKFNHTQHAELIQNLLPIVELTILSNDYDEKNDSQNVDVSAYFEDKSLYETAPYVQTDDRTRVSFRPILKLEKYHTKSLIEALLKDNPQFRVAATDIQEWMHKREEIGELVEKRKNLHTEWAEGQQTLGAEKREEYRDYCKKIDRFNWKANKVTLTYLSQLHYLITDLLGRMVGFSALFERDLVYFSRSFSELGGETYHISDYKNLSGVLRLNAEVKPIKIKNIKVIDNEENPYKGNEPEVKPFLDRLHAYLENVIGIKAVHGKIRNQTAHLSVLQLELSMIESMNNLRDLMAYDRKLKNAVTKSMIKILDKHGMILKLKIDENHKNFEIESLIPKEIIHLKDKAIKTNQVSEEYCQLVLALLTTNPGNQLN

SEQ ID NO: 11 - protein, 1373 aa, Artificial Sequence
  Chemically Synthesized
MKISKESHKRTAVAVMEDRVGGVVYVPGGSGIDLSNNLKKRSMDTKSLYNVFNQIQAGTAPSEYEWKDYLSEAENKKREAQKMIQKANYELRRECEDYAKKANLAVSRIIFSKKPKKIFSDDDIISHMKKQRLSKFKGRMEDFVLIALRKSLVVSTYNQEVFDSRKAATVFLKNIGKKNISADDERQIKQLMALIREDYDKWNPDKDSSDKKESSGTKVIRSIEHQNMVIQPEKNKLSLSKISNVGKKTKTKQKEKAGLDAFLKEYAQIDENSRMEYLKKLRRLLDTYFAAPSSYIKGAAVSLPENINFSSELNVWERHEAAKKVNINFVEIPESLLNAEQNNNKINKVEQEHSLEQLRTDIRRRNITCYHFANALAADERYHTLFFENMAMNQFWIHHMENAVERILKKCNVGTLFKLRIGYLSEKVWKDMLNLLSIKYIALGKAVYHFALDDIWKADIWKDASDKNSGKINDLTLKGISSFDYEMVKAQEDLQREMAVGVAFSTNNLARVTCKMDDLSDAESDFLLWNKEAIRRHVKYTEKGEILSAILQFFGGRSLWDESLFEKAYSDSNYELKFLDDLKRAIYAARNETFHFKTAAIDGGSWNTRLFGSLFEKEAGLCLNVEKNKFYSNNLVLFYKQEDLRVFLDKLYGKECSRAAQIPSYNTILPRKSFSDFMKQLLGLKEPVYGSAILDQWYSACYYLFKEVYYNLFLQDSSAKALFEKAVKALKGADKKQEKAVESFRKRYWEISKNASLAEICQSYITEYNQQNNKERKVRSANDGMFNEPIYQHYKMLLKEALKMAFASYIKNDKELKFVYKPTEKLFEVSQDNFLPNWNSEKYNTLISEVKNSPDLQKWYIVGKFMNARMLNLLLGSMRSYLQYVSDIQKRAAGLGENQLHLSAENVGQVKKWIQVLEVCLLLSVRISDKFTDYFKDEEEYASYLKEYVDFEDSAMPSDYSALLAFSNEGKIDLYVDASNPKVNRNIIQAKLYAPDMVLKKVVKKISQDECKEFNEKKEQIMQFKNKGDEVSWEEQQKILEYQKLKNRVELRDLSEYGELINELLGQLINWSYLRERDLLYFQLGFHYSCLMNESKKPDAYKTIRRGTVSIENAVLYQIIAMYINGFPVYAPEKGELKPQCKTGSAGQKIRAFCQWASMVEKKKYELYNAGLELFEVVKEHDNIIDLRNKIDHFKYYQGNDSILALYGEIFDRFFTYDMKYRNNVLNHLQNILLRHNVIIKPIISKDKKEVGRGKMKDRAAFLLEEVSSDRFTYKVKEGERKIDAKNRLYLETVRDILYFPNRAVNDKGEDVIICSKKAQDLNEKKADRDKNHDKSKDTNQKKEGKNQEEKSENKEPYSDRMTWKPFAGIKLE

SEQ ID NO: 12 - protein, 1344 aa, Artificial Sequence
  Chemically Synthesized
MLRRDKEVKKLYNVFNQIQVGTKPKKWNNDEKLSPEENERRAQQKNIKMKNYKWREACSKYVESSQRIINDVIFYSYRKAKNKLRYMRKNEDILKKMQEAEKLSKFSGGKLEDFVAYTLRKSLVVSKYDTQEFDSLAAMVVFLECIGKNNISDHEREIVCKLLELIRKDFSKLDPNVKGSQGANIVRSVRNQNMIVQPQGDRFLFPQVYAKENETVTNKNVEKEGLNEFLLNYANLDDEKRAESLRKLRRILDVYFSAPNHYEKDMDITLSDNIEKEKFNVWEKHECGKKETGLFVDIPDVLMEAEAENIKLDAVVEKRERKVLNDRVRKQNIICYRYTRAVVEKYNSNEPLFFENNAINQYWIHHIENAVERILKNCKAGKLFKLRKGYLAEKVWKDAINLISIKYIALGKAVYNFALDDIWKDKKNKELGIVDERIRNGITSFDYEMIKAHENLQRELAVDIAFSVNNLARAVCDMSNLGNKESDFLLWKRNDIADKLKNKDDMASVSAVLQFFGGKSSWDINIFKDAYKGKKKYNYEVRFIDDLRKAIYCARNENFHFKTALVNDEKWNTELFGKIFERETEFCLNVEKDRFYSNNLYMFYQVSELRNMLDHLYSRSVSRAAQVPSYNSVIVRTAFPEYITNVLGYQKPSYDADTLGKWYSACYYLLKEIYYNSFLQSDRALQLFEKSVKTLSWDDKKQQRAVDNFKDHFSDIKSACTSLAQVCQIYMTEYNQQNNQIKKVRSSNDSIFDQPVYQHYKVLLKKAIANAFADYLKNNKDLFGFIGKPFKANEIREIDKEQFLPDWTSRKYEALCIEVSGSQELQKWYIVGKFLNARSLNLMVGSMRSYIQYVTDIKRRAASIGNELHVSVHDVEKVEKWVQVIEVCSLLASRTSNQFEDYFNDKDDYARYLKSYVDFSNVDMPSEYSALVDFSNEEQSDLYVDPKNPKVNRNIVHSKLFAADHILRDIVEPVSKDNIEEFYSQKAEIAYCKIKGKEITAEEQKAVLKYQKLKNRVELRDIVEYGEIINELLGQLINWSFMRERDLLYFQLGFHYDCLRNDSKKPEGYKNIKVDENSIKDAILYQIIGMYVNGVTVYAPEKDGDKLKEQCVKGGVGVKVSAFHRYSKYLGLNEKTLYNAGLEIFEVVAEHEDIINLRNGIDHFKYYLGDYRSMLSIYSEVFDRFFTYDIKYQKNVLNLLQNILLRHNVIVEPILESGFKTIGEQTKPGAKLSIRSIKSDTFQYKVKGGTLITDAKDERYLETIRKILYYAENEEDNLKKSVVVTNADKYEKNKESDDQNKQKEKKNKDNKGKKNEETKSDAEKNNNERLSYNPFANLNFKLSN

SEQ ID NO: 13 - protein, 954 aa, Artificial Sequence
  Chemically Synthesized
MGKKIHARDLREQRKTDRTEKFADQNKKREAERAVPKKDAAVSVKSVSSVSSKKDNVTKSMAKAAGVKSVFAVGNTVYMTSFGRGNDAVLEQKIVDTSHEPLNIDDPAYQLNVVTMNGYSVTGHRGETVSAVTDNPLRRFNGRKKDEPEQSVPTDMLCLKPTLEKKFFGKEFDDNIHIQLIYNILDIEKILAVYSTNAIYALNNMSADENIENSDFFMKRTTDETFDDFEKKKESTNSREKADFDAFEKFIGNYRLAYFADAFYVNKKNPKGKAKNVLREDKELYSVLTLIGKLRHWCVHSEEGRAEFWLYKLDELKDDFKNVLDVVYNRPVEEINNRFIENNKVNIQILGSVYKNTDIAELVRSYYEFLITKKYKNMGFSIKKLRESMLEGKGYADKEYDSVRNKLYQMTDFILYTGYINEDSDRADDLVNTLRSSLKEDDKTTVYCKEADYLWKKYRESIREVADALDGDNIKKLSKSNIEIQEDKLRKCFISYADSVSEFTKLIYLLTRFLSGKEINDLVTTLINKFDNIRSFLEIMDELGLDRTFTAEYSFFEGSTKYLAELVELNSFVKSCSFDINAKRTMYRDALDILGIESDKTEEDIEKMIDNILQIDANGDKKLKKNNGLRNFIASNVIDSNRFKYLVRYGNPKKIRETAKCKPAVRFVLNEIPDAQIERYYEACCPKNTALCSANKRREKLADMIAEIKFENFSDAGNYQKANVTSRTSEAEIKRKNQAIIRLYLTVMYIMLKNLVNVNARYVIAFHCVERDTKLYAESGLEVGNIEKNKTNLTMAVMGVKLENGIIKTEFDKSFAENAANRYLRNARWYKLILDNLKKSERAVVNEFRNTVCHLNAIRNININIKEIKEVENYFALYHYLIQKHLENRFADKKVERDTGDFISKLEEHKTYCKDFVKAYCTPFGYNLVRYKNLTIDGLFDKNYPGKDDSDEQK

SEQ ID NO: 14 - protein, 1150 aa, Artificial Sequence
  Chemically Synthesized
MENLNKILDKENEICISKIFNTKGIAAPITEKALDNIKSKQKNDLNKEARLHYFSIGHSFKQIDTKKVFDYVLIEELKDEKPLKFITLQKDFFTKEFSIKLQKLINSIRNINNHYVHNFNDINLNKIDSNVFHFLKESFELAIIEKYYKVNKKYPLDNEIVLFLKELFIKDENTALLNYFTNLSKDEAIEYILTFTITENKIWNINNEHNILNIEKGKYLTFEAMLFLITIFLYKNEANHLLPKLYDFKNNKSKQELFTFFSKKFTSQDIDAEEGHLIKFRDMIQYLNHYPTAWNNDLKLESENKNKIMTTKLIDSIIEFELNSNYPSFATDIQFKKEAKAFLFASNKKRNQTSFSNKSYNEEIRHNPHIKQYRDEIASALTPISFNVKEDKFKIFVKKHVLEEYFPNSIGYEKFLEYNDFTEKEKEDFGLKLYSNPKTNKLIERIDNHKLVKSHGRNQDRFMDFSMRFLAENNYFGKDAFFKCYKFYDTQEQDEFLQSNENNDDVKFHKGKVTTYIKYEEHLKNYSYWDCPFVEENNSMSVKISIGSEEKILKIQRNLMIYFLENALYNENVENQGYKLVNNYYRELKKDVEESIASLDLIKSNPDFKSKYKKILPKRLLHNYAPAKQDKAPENAFETLLKKADFREEQYKKLLKKAEHEKNKEDFVKRNKGKQFKLHFIRKACQMMYFKEKYNTLKEGNAAFEKKDPVIEKRKNKEHEFGHHKNLNITREEFNDYCKWMFAFNGNDSYKKYLRDLFSEKHFFDNQEYKNLFESSVNLEAFYAKTKELFKKWIETNKPTNNENRYTLENYKNLILQKQVFINVYHFSKYLIDKNLLNSENNVIQYKSLENVEYLISDFYFQSKLSIDQYKTCGKLFNKLKSNKLEDCLLYEIAYNYIDKKNVHKIDIQKILTSKIILTINDANTPYKISVPFNKLERYTEMIAIKNQNNLKARFLIDLPLYLSKNKIKKGKDSAGYEIIIKNDLEIEDINTINNKIINDSVKFTEVLMELEKYFILKDKCILSKNYIDNSEIPSLKQFSKVWIKENENEIINYRNIACHFHLPLLETFDNLLLNVEQKFIKEELQNVSTINDLSKPQEYLILLFIKFKHNNFYLNLFNKNESKTIKNDKEVKKNRVLQKFINQVILKKK

SEQ ID NO: 15 - protein, 1110 aa, Artificial Sequence
  Chemically Synthesized
MKVRYRKQAQLDTFIIKTEIVNNDIFIKSIIEKAREKYRYSFLFDGEEKYHFKNKSSVEIVKNDIFSQTPDNMIRNYKITLKISEKNPRVVEAEIEDLMNSTILKDGRRSARREKSMTERKLIEEKVAENYSLLANCPIEEVDSIKIYKIKRFLTYRSNMLLYFASINSFLCEGIKGKDNETEEIWHLKDNDVRKEKVKENFKNKLIQSTENYNSSLKNQIEEKEKLSSKEFKKGAFYRTIIKKLQQERIKELSEKSLTEDCEKIIKLYSELRHPLMHYDYQYFENLFENKENSELTKNLNLDIFKSLPLVRKMKLNNKVNYLEDNDTLFVLQKTKKAKTLYQIYDALCEQKNGFNKFINDFFVSDGEENTVFKQIINEKFQSEMEFLEKRISESEKKNEKLKKKLDSMKAHFRNINSEDTKEAYFWDIHSSRNYKTKYNERKNLVNEYTKLLGSSKEKKLLREEITKINRQLLKLKQEMEEITKKNSLFRLEYKMKIAFGFLFCEFDGNISKFKDEFDASNQEKIIQYHKNGEKYLTSFLKEEEKEKFNLEKMQKIIQKTEEEDWLLPETKNNLFKFYLLTYLLLPYELKGDFLGFVKKHYYDIKNVDFMDENQNNIQVSQTVEKQEDYFYHKIRLFEKNTKKYEIVKYSIVPNEKLKQYFEDLGIDIKYLTGSVESGEKWLGENLGIDIKYLTVEQKSEVSEEKNKKVSLKNNGMFNKTILLFVFKYYQIAFKLFNDIELYSLFFLREKSEKPFEVFLEELKDKMIGKQLNFGQLLYVVYEVLVKNKDLDKILSKKIDYRKDKSFSPEIAYLRNFLSHLNYSKFLDNFMKINTNKSDENKEVLIPSIKIQKMIQFIEKCNLQNQIDFDFNFVNDFYMRKEKMFFIQLKQIFPDINSTEKQKKSEKEEILRKRYHLINKKNEQIKDEHEAQSQLYEKILSLQKIFSCDKNNFYRRLKEEKLLFLEKQGKKKISMKEIKDKIASDISDLLGILKKEITRDIKDKLTEKFRYCEEKLLNISFYNHQDKKKEEGIRVFLIRDKNSDNFKFESILDDGSNKIFISKNGKEITIQCCDKVLETLMIEKNTLKISSNGKIISLIPHYSYSIDVKY

SEQ ID NO: 16 - protein, 1111 aa, Artificial Sequence
  Chemically Synthesized
MEKFRRQNRSSIIKIIISNYDTKGIKELKVRYRKQAQLDTFIIKTEIVNNDIFIKSIIEKAREKYRYSFLFDGEEKYHFKNKSSVEIVKKDIFSQTPDNMIRNYKITLKISEKNPRVVEAEIEDLMNSTILKDGRRSARREKSMTERKLIEEKVAENYSLLANCPMEEVDSIKIYKIKRFLTYRSNMLLYFASINSFLCEGIKGKDNETEEIWHLKDNDVRKEKVKENFKNKLIQSTENYNSSLKNQIEEKEKLLRKESKKGAFYRTIIKKLQQERIKELSEKSLTEDCEKIIKLYSELRHPLMHYDYQYFENLFENKENSELTKNLNLDIFKSLPLVRKMKLNNKVNYLEDNDTLFVLQKTKKAKTLYQIYDALCEQKNGFNKFINDFFVSDGEENTVFKQIINEKFQSEIEFLEKRISESEKKNEKLKKKLDSMKAHFRNINSEDTKEAYFWDIHSSRNYKTKYNERKNLVNEYTELLGSSKEKKLLREEITKINRQLLKLKQEMEEITKKNSLFRLEYKMKMAFGFLFCEFDGNISRFKDEFDASNQEKIIQYHKNGEKYLTYFLKEEEKEKFNLKKLQETIQKTGEENWLLPQNKNNLFKFYLLTYLLLPYELKGDFLGFVKKHYYDIKNVDFMDENQSSKIIESKEDDFYHKIRLFEKNTKKYEIVKYSIVPDKKLKQYFKDLGIDTKYLILDQKSEVSGEKNKKVSLKNNGMFNKTILLFVFKYYQIAFKLFNDIELYSLFFLREKSGKPFEVFLKELKDKMIGKQLNFGQLLYVVYEVLVKNKDLSEILSERIDYRKDMCFSAEIADLRNFLSHLNYSKFLDNFMKINTNKSDENKEVLIPSIKIQKMIKFIEECNLQSQIDFDFNFVNDFYMRKEKMFFIQLKQIFPDINSTEKQKMNEKEEILRNRYHLTDKKNEQIKDEHEAQSQLYEKILSLQKIYSSDKNNFYGRLKEEKLLFLEKQEKKKLSMEEIKDKIAGDISDLLGILKKEITRDIKDKLTEKFRYCEEKLLNLSFYNHQDKKKEESIRVFLIRDKNSDNFKFESILDDGSNKIFISKNGKEITIQCCDKVLETLIIEKNTLKISSNGKIISLIPHYSYSIDVKY

SEQ ID NO: 17 - protein, 668 aa, Artificial Sequence
  Chemically Synthesized
MTEKKSIIFKNKSSVEIVKKDIFSQTPDNMIRNYKITLKISEKNPRVVEAEIEDLMNSTILKDGRRSARREKSMTERKLIEEKVAENYSLLANCPMEEVDSIKIYKIKRFLTYRSNMLLYFASINSFLCEGIKGKDNETEEIWHLKDNDVRKEKVKENFKNKLIQSTENYNSSLKNQIEEKEKLLRKESKKGAFYRTIIKKLQQERIKELSEKSLTEDCEKIIKLYSELRHPLMHYDYQYFENLFENKENSELTKNLNLDIFKSLPLVRKMKLNNKVNYLEDNDTLFVLQKTKKAKTLYQIYDALCEQKNGFNKFINDFFVSDGEENTVFKQIINEKFQSEMEFLEKRISESEKKNEKLKKKFDSMKAHFHNINSEDTKEAYFWDIHSSSNYKTKYNERKNLVNEYTELLGSSKEKKLLREEITQINRKLLKLKQEMEEITKKNSLFRLEYKMKIAFGFLFCEFDGNISKFKDEFDASNQEKIIQYHKNGEKYLTYFLKEEEKEKFNLEKMQKIIQKTEEEDWLLPETKNNLFKFYLLTYLLLPYELKGDFLGFVKKHYYDIKNVDFMDENQNNIQVSQTVEKQEDYFYHKIRLFEKNTKKYEIVKYSIVPNEKLKQYFEDLGIDIKYLTGSVESGEKWLGENLGIDIKYLTVEQKSEVSEEKIKKFL

SEQ ID NO: 18 - protein, 1115 aa, Artificial Sequence
  Chemically Synthesized
MEKFRRQNRNSIIKIIISNYDTKGIKELKVRYRKQAQLDTFIIKTEIVNNDIFIKSIIEKAREKYRYSFLFDGEEKYHFKNKSSVEIVKKDIFSQTPDNMIRNYKITLKISEKNPRVVEAEIEDLMNSTILKDGRRSARREKSMTERKLIEEKVAKNYSLLANCPMEEVDSIKIYKIKRFLTYRSNMLLYFASINSFLCEGIKGKDNETEEIWHLKDNDVRKEKVRENFKNKLIQSTENYNSSLKNQIEEKEKLLRKEFKKGAFYRTIIKKLQQERIKELSEKSLTEDCEKIIKLYSKLRHSLMHYDYQYFENLFENKKNDDLMKDLNLDLFKSLPLIRKMKLNNKVNYLEDGDTLFVLQKTKKAKTLYQIYDALCEQKNGFNKFINDFFVSDGEENTVFKQIINEKFQSEMEFLEKRISESEKKNEKLKKKLDSMKAHFRNINSEDTKEAYFWDIHSSRNYKTKYNERKNLVNEYTELLGSSKEKKLLREEITKINRQLLKLKQEMEEITKKNSLFRLEYKMKIAFGFLFCEFDGNISKFKDEFDASNQEKIIQYHKNGEKYLTSFLKEEEKEKFNLEKMQKIIQKTEEEDWLLPETKNNLFKFYLLTYLLLPYELKGDFLGFVKKHYYDIKNVDFIDENQNNIQVSQTVEKQEDYFYHKIRLFEKNTKKYEIVKYSIVPNEKLKQYFEDLGIDIKYLTVEQKSEVSEEKNKKVSLKNNGMFNKTILLFVFKYYQIAFKLFNDIELYSLFFLREKSGKPLEIFRKELESKMKDGYLNFGQLLYVVYEVLVKNKDLDKILSKKIDYRKDKSFSPEIAYLRNFLSHLNYSKFLDNFMKINTNKSDENKEVLIPSIKIQKMIQFIEKCNLQNQIDFDFNFVNDFYMRKEKMFFIQLKQIFPDINSTEKQKMNEKEEILRNRYHLTDKKNEQIKDEHEAQSQLYEKILSLQKIYSSDKNNFYGRLKEEKLLFLEKQGKKKLSMEEIKDKIAGDISDLLGILKKEITRDIKDKLTEKFRYCEEKLLNLSFYNHQDKKKEESIRVFLIRDKNSDNFKFESILDDGSNKIFISKNGKEITIQCCDKVLETLIIEKNTLKISSNGKIISLIPHYSYSIDVKY

SEQ ID NO: 19 - protein, 1121 aa, Artificial Sequence
  Chemically Synthesized
MGKPNRSSIIKIIISNYDNKGIKEVKVRYNKQAQLDTFLIKSELKDGKFILYSIVDKAREKYRYSFEIDKTNINKNEILIIKKDIYSNKEDKVIRKYILSFEVSEKNDRTIVTKIKDCLETQKKEKFERENTRRLISETERKLLSEETQKTYSKIACCSPEDIDSVKIYKIKRYLAYRSNMLLFFSLINDIFVKGVVKDNGEEVGEIWRIIDSKEIDEKKTYDLLVENFKKRMSQEFINYKQSIENKIEKNTNKIKEIEQKLKKEKYKKEINRLKKQLIELNRENDLLEKDKIELSDEEIREDIEKILKIYSDLRHKLMHYNYQYFENLFENKKISKEKNEDVNLTELLDLNLFRYLPLVRQLKLENKTNYLEKEDKITVLGVSDSAIKYYSYYNFLCEQKNGFNNFINSFFSNDGEENKSFKEKINLSLEKEIEIMEKETNEKIKEINKNELQLMKEQKELGTAYVLDIHSLNDYKISHNERNKNVKLQNDIMNGNRDKNALDKINKKLVELKIKMDKITKRNSILRLKYKLQVAYGFLMEEYKGNIKKFKDEFDISKEKIKSYKSKGEKYLEVKSEKKYITKILNSIEDIHNITWLKNQEENNLFKFYVLTYILLPFEFRGDFLGFVKKHYYDIKNVEFLDENNDRLTPEQLEKMKNDSFFNKIRLFEKNSKKYDILKESILTSERIGKYFSLLNTGAKYFEYGGEENRGIFNKNIIIPIFKYYQIVLKLYNDVELAMLLTLSESDEKDINKIKELVTLKEKVSPKKIDYEKKYKFSVLLDCFNRIINLGKKDFLASEEVKEVAKTFTNLAYLRNKICHLNYSKFIDDLLTIDTNKSTTDSEGKLLINDRIRKLIKFIRENNQKMNISIDYNYINDYYMKKEKFIFGQRKQAKTIIDSGKKANKRNKAEELLKMYRVKKENINLIYELSKKLNELTKSELFLLDKKLLKDIDFTDVKIKNKSFFELKNDVKEVANIKQALQKHSSELIGIYKKEVIMAIKRSIVSKLIYDEEKVLSIIIYDKTNKKYEDFLLEIRRERDINKFQFLIDEKKEKLGYEKIIETKEKKKVVVKIQNNSELVSEPRIIKNKDKKKAKTPEEISKLGILDLTNHYCFNLKITL

SEQ ID NO: 20 - protein, 897 aa, Artificial Sequence
  Chemically Synthesized
MENKGNNKKIDFDENYNILVAQIKEYFTKEIENYNNRIDNIIDKKELLKYSEKKEESEKNKKLEELNKLKSQKLKILTDEEIKADVIKIIKIFSDLRHSLMHYEYKYFENLFENKKNEELAELLNLNLFKNLTLLRQMKIENKTNYLEGREEFNIIGKNIKAKEVLGHYNLLAEQKNGFNNFINSFFVQDGTENLEFKKLIDEHFVNAKKRLERNIKKSKKLEKELEKMEQHYQRLNCAYVWDIHTSTTYKKLYNKRKSLIEEYNKQINEIKDKEVITAINVELLRIKKEMEEITKSNSLFRLKYKMQIAYAFLEIEFGGNIAKFKDEFDCSKMEEVQKYLKKGVKYLKYYKDKEAQKNYEFPFEEIFENKDTHNEEWLENTSENNLFKFYILTYLLLPMEFKGDFLGVVKKHYYDIKNVDFTDESEKELSQVQLDKMIGDSFFHKIRLFEKNTKRYEIIKYSILTSDEIKRYFRLLELDVPYFEYEKGTDEIGIFNKNIILTIFKYYQIIFRLYNDLEIHGLFNISSDLDKILRDLKSYGNKNINFREFLYVIKQNNNSSTEEEYRKIWENLEAKYLRLHLLTPEKEEIKTKTKEELEKLNEISNLRNGICHLNYKEIIEEILKTEISEKNKEATLNEKIRKVINFIKENELDKVELGFNFINDFFMKKEQFMFGQIKQVKEGNSDSITTERERKEKNNKKLKETYELNCDNLSEFYETSNNLRERANSSSLLEDSAFLKKIGLYKVKNNKVNSKVKDEEKRIENIKRKLLKDSSDIMGMYKAEVVKKLKEKLILIFKHDEEKRIYVTVYDTSKAVPENISKEILVKRNNSKEEYFFEDNNKKYVTEYYTLEITETNELKVIPAKKLEGKEFKTEKNKENKLMLNNHYCFNVKIIY

SEQ ID NO: 21 - protein, 1285 aa, Artificial Sequence
  Chemically Synthesized
MKLTRRRISGNSVDQKITAAFYRDMSQGLLYYDSEDNDCTDKVIESMDFERSWRGRILKNGEDDKNPFYMFVKGLVGSNDKIVCEPIDVDSDPDNLDILINKNLTGFGRNLKAPDSNDTLENLIRKIQAGIPEEEVLPELKKIKEMIQKDIVNRKEQLLKSIKNNRIPFSLEGSKLVPSTKKMKWLFKLIDVPNKTFNEKMLEKYWEIYDYDKLKANITNRLDKTDKKARSISRAVSEELREYHKNLRTNYNRFVSGDRPAAGLDNGGSAKYNPDKEEFLLFLKEVEQYFKKYFPVKSKHSNKSKDKSLVDKYKNYCSYKVVKKEVNRSIINQLVAGLIQQGKLLYYFYYNDTWQEDFLNSYGLSYIQVEEAFKKSVMTSLSWGINRLTSFFIDDSNTVKFDDITTKKAKEAIESNYFNKLRTCSRMQDHFKEKLAFFYPVYVKDKKDRPDDDIENLIVLVKNAIESVSYLRNRTFHFKESSLLELLKELDDKNSGQNKIDYSVAAEFIKRDIENLYDVFREQIRSLGIAEYYKADMISDCFKTCGLEFALYSPKNSLMPAFKNVYKRGANLNKAYIRDKGPKETGDQGQNSYKALEEYRELTWYIEVKNNDQSYNAYKNLLQLIYYHAFLPEVRENEALITDFINRTKEWNRKETEERLNTKNNKKHKNFDENDDITVNTYRYESIPDYQGESLDDYLKVLQRKQMARAKEVNEKEEGNNNYIQFIRDVVVWAFGAYLENKLKNYKNELQPPLSKENIGLNDTLKELFPEEKVKSPFNIKCRFSISTFIDNKGKSTDNTSAEAVKTDGKEDEKDKKNIKRKDLLCFYLFLRLLDENEICKLQHQFIKYRCSLKERRFPGNRTKLEKETELLAELEELMELVRFTMPSIPEISAKAESGYDTMIKKYFKDFIEKKVFKNPKTSNLYYHSDSKTPVTRKYMALLMRSAPLHLYKDIFKGYYLITKKECLEYIKLSNIIKDYQNSLNELHEQLERIKLKSEKQNGKDSLYLDKKDFYKVKEYVENLEQVARYKHLQHKINFESLYRIFRIHVDIAARMVGYTQDWERDMHFLFKALVYNGVLEERRFEAIFNNNDDNNDGRIVKKIQNNLNNKNRELVSMLCWNKKLNKNEFGAIIWKRNPIAHLNHFTQTEQNSKSSLESLINSLRILLAYDRKRQNAVTKTINDLLLNDYHIRIKWEGRVDEGQIYFNIKEKEDIENEPIIHLKHLHKKDCYIYKNSYMFDKQKEWICNGIKEEVYDKSILKCIGNLFKFDYEDKNKSSANPKHT

SEQ ID NO: 22 - protein, 1051 aa, Artificial Sequence
  Chemically Synthesized
MKITKMRVDGRTIVMERTSKEGQLGYEGIDGNKTTEIIFDKKKESFYKSILNKTVRKPDEKEKNRRKQAINKAINKEITELMLAVLHQEVPSQKLHNLKSLNTESLTKLFKPKFQNMISYPPSKGAEHVQFCLTDIAVPAIRDLDEIKPDWGIFFEKLKPYTDWAESYIHYKQTTIQKSIEQNKIQSPDSPRKLVLQKYVTAFLNGEPLGLDLVAKKYKLADLAESFKLVDLNEDKSANYKIKACLQQHQRNILDELKEDPELNQYGIEVKKYIQRYFPIKRAPNRSKHARADFLKKELIESTVEQQFKNAVYHYVLEQGKMEAYELTDPKTKDLQDIRSGEAFSFKFINACAFASNNLKMILNPECEKDILGKGNFKKNLPNSTTRSDVVKKMIPFFSDELQNVNFDEAIWAIRGSIQQIRNEVYHCKKHSWKSILKIKGFEFEPNNMKYADSDMQKLMDKDIAKIPEFIEEKLKSSGVVRFYRHDELQSIWEMKQGFSLLTTNAPFVPSFKRVYAKGHDYQTSKNRYYNLDLTTFDILEYGEEDFRARYFLTKLVYYQQFMPWFTADNNAFRDAANFVLRLNKNRQQDAKAFINIREVEEGEMPRDYMGYVQGQIAIHEDSIEDTPNHFEKFISQVFIKGFDRHMRSANLKFIKNPRNQGLEQSEIEEMSFDIKVEPSFLKNKDDYIAFWIFCKMLDARHLSELRNEMIKYDGHLTGEQEIIGLALLGVDSRENDWKQFFSSEREYEKIMKGYVVEELYQREPYRQSDGKTPILFRGVEQARKYGTETVIQRLFDANPEFKVSKCNLAEWERQKETIEETIKRRKELHNEWAKNPKKPQNNAFFKEYKECCDAIDAYNWHKNKTTLAYVNELHHLLIEILGRYVGYVAIADRDFQCMANQYFKHSGITERVEYWGDNRLKSIKKLDTFLKKEGLFVSEKNARNHIAHLNYLSLKSECTLLYLSERLREIFKYDRKLKNAVSKSLIDILDRHGMSVVFANLKENKHRLVIKSLEPKKLRHLGGKKIDGGYIETNQVSEEYCGIVKRLLEM

SEQ ID NO: 23 - protein, 1340 aa, Artificial Sequence
  Chemically Synthesized
MQISKVNHKHVAVGQKDRERITGFIYNDPVGDEKSLEDVVAKRANDTKVLFNVFNTKDLYDSQESDKSEKDKEIISKGAKFVAKSFNSAITILKKQNKIYSTLTSQQVIKELKDKFGGARIYDDDIEEALTETLKKSFRKENVRNSIKVLIENAAGIRSSLSKDEEELIQEYFVKQLVEEYTKTKLQKNVVKSIKNQNMVIQPDSDSQVLSLSESRREKQSSAVSSDTLVNCKEKDVLKAFLTDYAVLDEDERNSLLWKLRNLVNLYFYGSESIRDYSYTKEKSVWKEHDEQKANKTLFIDEICHITKIGKNGKEQKVLDYEENRSRCRKQNINYYRSALNYAKNNTSGIFENEDSNHFWIHLIENEVERLYNGIENGEEFKFETGYISEKVWKAVINHLSIKYIALGKAVYNYAMKELSSPGDIEPGKIDDSYINGITSFDYEIIKAEESLQRDISMNVVFATNYLACATVDTDKDFLLFSKEDIRSCTKKDGNLCKNIMQFWGGYSTWKNFCEEYLKDDKDALELLYSLKSMLYSMRNSSFHFSTENVDNGSWDTELIGKLFEEDCNRAARIEKEKFYNNNLHMFYSSSLLEKVLERLYSSHHERASQVPSFNRVFVRKNFPSSLSEQRITPKFTDSKDEQIWQSAVYYLCKEIYYNDFLQSKEAYKLFREGVKNLDKNDINNQKAADSFKQAVVYYGKAIGNATLSQVCQAIMTEYNRQNNDGLKKKSAYAEKQNSNKYKHYPLFLKQVLQSAFWEYLDENKEIYGFISAQIHKSNVEIKAEDFIANYSSQQYKKLVDKVKKTPELQKWYTLGRLINPRQANQFLGSIRNYVQFVKDIQRRAKENGNPIRNYYEVLESDSIIKILEMCTKLNGTTSNDIHDYFRDEDEYAEYISQFVNFGDVHSGAALNAFCNSESEGKKNGIYYDGINPIVNRNWVLCKLYGSPDLISKIISRVNENMIHDFHKQEDLIREYQIKGICSNKKEQQDLRTFQVLKNRVELRDIVEYSEIINELYGQLIKWCYLRERDLMYFQLGFHYLCLNNASSKEADYIKINVDDRNISGAILYQIAAMYINGLPVYYKKDDMYVALKSGKKASDELNSNEQTSKKINYFLKYGNNILGDKKDQLYLAGLELFENVAEHENIIIFRNEIDHFHYFYDRDRSMLDLYSEVFDRFFTYDMKLRKNVVNMLYNILLDHNIVSSFVFETGEKKVGRGDSEVIKPSAKIRLRANNGVSSDVFTYKVGSKDELKIATLPAKNEEFLLNVARLIYYPDMEAVSENMVREGVVKVEKSNDKKGKISRGSNTRSSNQSKYNNKSKNRMNYSMGSIFEKMDLKFD

SEQ ID NO: 24 - protein, 1437 aa, Artificial Sequence
  Chemically Synthesized
MKISKVREENRGAKLTVNAKTAVVSENRSQEGILYNDPSRYGKSRKNDEDRDRYIESRLKSSGKLYRIFNEDKNKRETDELQWFLSEIVKKINRRNGLVLSDMLSVDDRAFEKAFEKYAELSYTNRRNKVSGSPAFETCGVDAATAERLKGIISETNFINRIKNNIDNKVSEDIIDRIIAKYLKKSLCRERVKRGLKKLLMNAFDLPYSDPDIDVQRDFIDYVLEDFYHVRAKSQVSRSIKNMNMPVQPEGDGKFAITVSKGGTESGNKRSAEKEAFKKFLSDYASLDERVRDDMLRRMRRLVVLYFYGSDDSKLSDVNEKFDVWEDHAARRVDNREFIKLPLENKLANGKTDKDAERIRKNTVKELYRNQNIGCYRQAVKAVEEDNNGRYFDDKMLNMFFIHRIEYGVEKIYANLKQVTEFKARTGYLSEKIWKDLINYISIKYIAMGKAVYNYAMDELNASDKKEIELGKISEEYLSGISSFDYELIKAEEMLQRETAVYVAFAARHLSSQTVELDSENSDFLLLKPKGTMDKNDKNKLASNNILNFLKDKETLRDTILQYFGGHSLWTDFPFDKYLAGGKDDVDFLTDLKDVIYSMRNDSFHYATENHNNGKWNKELISAMFEHETERMTVVMKDKFYSNNLPMFYKNDDLKKLLIDLYKDNVERASQVPSFNKVFVRKNFPALVRDKDNLGIELDLKADADKGENELKFYNALYYMFKEIYYNAFLNDKNVRERFITKATKVADNYDRNKERNLKDRIKSAGSDEKKKLREQLQNYIAENDFGQRIKNIVQVNPDYTLAQICQLIMTEYNQQNNGCMQKKSAARKDINKDSYQHYKMLLLVNLRKAFLEFIKENYAFVLKPYKHDLCDKADFVPDFAKYVKPYAGLISRVAGSSELQKWYIVSRFLSPAQANHMLGFLHSYKQYVWDIYRRASETGTEINHSIAEDKIAGVDITDVDAVIDLSVKLCGTISSEISDYFKDDEVYAEYISSYLDFEYDGGNYKDSLNRFCNSDAVNDQKVALYYDGEHPKLNRNIILSKLYGERRFLEKITDRVSRSDIVEYYKLKKETSQYQTKGIFDSEDEQKNIKKFQEMKNIVEFRDLMDYSEIADELQGQLINWIYLRERDLMNFQLGYHYACLNNDSNKQATYVTLDYQGKKNRKINGAILYQICAMYINGLPLYYVDKDSSEWTVSDGKESTGAKIGEFYRYAKSFENTSDCYASGLEIFENISEHDNITELRNYIEHFRYYSSFDRSFLGIYSEVFDRFFTYDLKYRKNVPTILYNILLQHFVNVRFEFVSGKKMIGIDKKDRKIAKEKECARITIREKNGVYSEQFTYKLKNGTVYVDARDKRYLQSIIRLLFYPEKVNMDEMIEVKEKKKPSDNNTGKGYSKRDRQQDRKEYDKYKEKKKKEGNFLSGMGGNINWDEINAQLKN

SEQ ID NO: 25 - protein, 1159 aa, Artificial Sequence
  Chemically Synthesized
MKVTKVGGISHKKYTSEGRLVKSESEENRTDERLSALLNMRLDMYIKNPSSTETKENQKRIGKLKKFFSNKMVYLKDNTLSLKNGKKENIDREYSETDILESDVRDKKNFAVLKKIYLNENVNSEELEVFRNDIKKKLNKINSLKYSFEKNKANYQKINENNIEKVEGKSKRNIIYDYYRESAKRDAYVSNVKEAFDKLYKEEDIAKLVLEIENLTKLEKYKIREFYHEIIGRKNDKENFAKIIYEEIQNVNNMKELIEKVPDMSELKKSQVFYKYYLDKEELNDKNIKYAFCHFVEIEMSQLLKNYVYKRLSNISNDKIKRIFEYQNLKKLIENKLLNKLDTYVRNCGKYNYYLQDGEIATSDFIARNRQNEAFLRNIIGVSSVAYFSLRNILETENENDITGRMRGKTVKNNKGEEKYVSGEVDKIYNENKKNEVKENLKMFYSYDFNMDNKNEIEDFFANIDEAISSIRHGIVHFNLELEGKDIFAFKNIAPSEISKKMFQNEINEKKLKLKIFRQLNSANVFRYLEKYKILNYLKRTRFEFVNKNIPFVPSFTKLYSRIDDLKNSLGIYWKTPKTNDDNKTKEIIDAQIYLLKNIYYGEFLNYFMSNNGNFFEISKEIIELNKNDKRNLKTGFYKLQKFEDIQEKIPKEYLANIQSLYMINAGNQDEEEKDTYIDFIQKIFLKGFMTYLANNGRLSLIYIGSDEETNTSLAEKKQEFDKFLKKYEQNNNIKIPYEINEFLREIKLGNILKYTERLNMFYLILKLLNHKELTNLKGSLEKYQSANKEEAFSDQLELINLLNLDNNRVTEDFELEADEIGKFLDFNGNKVKDNKELKKFDTNKIYFDGENIIKHRAFYNIKKYGMLNLLEKIADKAGYKISIEELKKYSNKKNEIEKNHKMQENLHRKYARPRKDEKFTDEDYESYKQAIENIEEYTHLKNKVEFNELNLLQGLLLRILHRLVGYTSIWERDLRFRLKGEFPENQYIEEIFNFENKKNVKYKGGQIVEKYIKFYKELHQNDEVKINKYSSANIKVLKQEKKDLYIRNYIAHFNYIPHAEISLLEVLENLRKLLSYDRKLKNAVMKSVVDILKEYGFVATFKIGADKKIGIQTLESEKIVHLKNLKKKKLMTDRNSEELCKLVKIMFEYKMEEKKSEN

SEQ ID NO: 26 - protein, 1120 aa, Artificial Sequence
  Chemically Synthesized
MWISIKTLIHHLGVLFFCDYMYNRREKKIIEVKTMRITKVEVDRKKVLISRDKNGGKLVYENEMQDNTEQIMHHKKSSFYKSVVNKTICRPEQKQMKKLVHGLLQENSQEKIKVSDVTKLNISNFLNHRFKKSLYYFPENSPDKSEEYRIEINLSQLLEDSLKKQQGTFICWESFSKDMELYINWAENYISSKTKLIKKSIRNNRIQSTESRSGQLMDRYMKDILNKNKPFDIQSVSEKYQLEKLTSALKATFKEAKKNDKEINYKLKSTLQNHERQIIEELKENSELNQFNIEIRKHLETYFPIKKTNRKVGDIRNLEIGEIQKIVNHRLKNKIVQRILQEGKLASYEIESTVNSNSLQKIKIEEAFALKFINACLFASNNLRNMVYPVCKKDILMIGEFKNSFKEIKHKKFIRQWSQFFSQEITVDDIELASWGLRGAIAPIRNEIIHLKKHSWKKFFNNPTFKVKKSKIINGKTKDVTSEFLYKETLFKDYFYSELDSVPELIINKMESSKILDYYSSDQLNQVFTIPNFELSLLTSAVPFAPSFKRVYLKGFDYQNQDEAQPDYNLKLNIYNEKAFNSEAFQAQYSLFKMVYYQVFLPQFTTNNDLFKSSVDFILTLNKERKGYAKAFQDIRKMNKDEKPSEYMSYIQSQLMLYQKKQEEKEKINHFEKFINQVFIKGFNSFIEKNRLTYICHPTKNTVPENDNIEIPFHTDMDDSNIAFWLMCKLLDAKQLSELRNEMIKFSCSLQSTEEISTFTKAREVIGLALLNGEKGCNDWKELFDDKEAWKKNMSLYVSEELLQSLPYTQEDGQTPVINRSIDLVKKYGTETILEKLFSSSDDYKVSAKDIAKLHEYDVTEKIAQQESLHKQWIEKPGLARDSAWTKKYQNVINDISNYQWAKTKVELTQVRHLHQLTIDLLSRLAGYMSIADRDFQFSSNYILERENSEYRVTSWILLSENKNKNKYNDYELYNLKNASIKVSSKNDPQLKVDLKQLRLTLEYLELFDNRLKEKRNNISHFNYLNGQLGNSILELFDDARDVLSYDRKLKNAVSKSLKEILSSHGMEVTFKPLYQTNHHLKIDKLQPKKIHHLGEKSTVSSNQVSNEYCQLVRTLLTMK

SEQ ID NO: 27 - protein, 1389 aa, Artificial Sequence
  Chemically Synthesized
MGNLFGHKRWYEVRDKKDFKIKRKVKVKRNYDGNKYILNINENNNKEKIDNNKFIRKYINYKKNDNILKEFTRKFHAGNILFKLKGKEGIIRIENNDDFLETEEVVLYIEAYGKSEKLKALGITKKKIIDEAIRQGITKDDKKIEIKRQENEEEIEIDIRDEYTNKTLNDCSIILRIIENDELETKKSIYEIFKNINMSLYKIIEKIIENETEKVFENRYYEEHLREKLLKDDKIDVILTNFMEIREKIKSNLEILGFVKFYLNVGGDKKKSKNKKMLVEKILNINVDLTVEDIADFVIKELEFWNITKRIEKVKKVNNEFLEKRRNRTYIKSYVLLDKHEKFKIERENKKDKIVKFFVENIKNNSIKEKIEKILAEFKIDELIKKLEKELKKGNCDTEIFGIFKKHYKVNFDSKKFSKKSDEEKELYKIIYRYLKGRIEKILVNEQKVRLKKMEKIEIEKILNESILSEKILKRVKQYTLEHIMYLGKLRHNDIDMTTVNTDDFSRLHAKEELDLELITFFASTNMELNKIFSRENINNDENIDFFGGDREKNYVLDKKILNSKIKIIRDLDFIDNKNNITNNFIRKFTKIGTNERNRILHAISKERDLQGTQDDYNKVINIIQNLKISDEEVSKALNLDVVFKDKKNIITKINDIKISEENNNDIKYLPSFSKVLPEILNLYRNNPKNEPFDTIETEKIVLNALIYVNKELYKKLILEDDLEENESKNIFLQELKKTLGNIDEIDENIIENYYKNAQISASKGNNKAIKKYQKKVIECYIGYLRKNYEELFDFSDFKMNIQEIKKQIKDINDNKTYERITVKTSDKTIVINDDFEYIISIFALLNSNAVINKIRNRFFATSVWLNTSEYQNIIDILDEIMQLNTLRNECITENWNLNLEEFIQKMKEIEKDFDDFKIQTKKEIFNNYYEDIKNNILTEFKDDINGCDVLEKKLEKIVIFDDETKFEIDKKSNILQDEQRKLSNINKKDLKKKVDQYIKDKDQEIKSKILCRIIFNSDFLKKYKKEIDNLIEDMESENENKFQEIYYPKERKNELYIYKKNLFLNIGNPNFDKIYGLISNDIKMADAKFLFNIDGKNIRKNKISEIDAILKNLNDKLNGYSKEYKEKYIKKLKENDDFFAKNIQNKNYKSFEKDYNRVSEYKKIRDLVEFNYLNKIESYLIDINWKLAIQMARFERDMHYIVNGLRELGIIKLSGYNTGISRAYPKRNGSDGFYTTTAYYKFFDEESYKKFEKICYGFGIDLSENSEINKPENESIRNYISHFYIVRNPFADYSIAEQIDRVSNLLSYSTRYNNSTYASVFEVFKKDVNLDYDELKKKFKLIGNNDILERLMKPKKVSVLELESYNSDYIKNLIIELLTKIENTNDTL

SEQ ID NO: 28 - protein, 1385 aa, Artificial Sequence
  Chemically Synthesized
MGNLFGHKRWYEVRDKKDFKIKRKVKVKRNYDGNKYILNINENNNKEKIDNNKFIGEFVNYKKNNNVLKEFKRKFHAGNILFKLKGKEEIIRIENNDDFLETEEVVLYIEVYGKSEKLKALEITKKKIIDEAIRQGITKDDKKIEIKRQENEEEIEIDIRDEYTNKTLNDCSIILRIIENDELETKKSIYEIFKNINMSLYKIIEKIIENETEKVFENRYYEEHLREKLLKDNKIDVILTNFMEIREKIKSNLEIMGFVKFYLNVSGDKKKSENKKMFVEKILNTNVDLTVEDIVDFIVKELKFWNITKRIEKVKKFNNEFLENRRNRTYIKSYVLLDKHEKFKIERENKKDKIVKFFVENIKNNSIKEKIEKILAEFKINELIKKLEKELKKGNCDTEIFGIFKKHYKVNFDSKKFSNKSDEEKELYKIIYRYLKGRIEKILVNEQKVRLKKMEKIEIEKILNESILSEKILKRVKQYTLEHIMYLGKLRHNDIVKMTVNTDDFSRLHAKEELDLELITFFASTNMELNKIFNGKEKVTDFFGFNLNGQKITLKEKVPSFKLNILKKLNFINNENNIDEKLSHFYSFQKEGYLLRNKILHNSYGNIQETKNLKGEYENVEKLIKELKVSDEEISKSLSLDVIFEGKVDIINKINSLKIGEYKDKKYLPSFSKIVLEITRKFREINKDKLFDIESEKIILNAVKYVNKILYEKITSNEENEFLKTLPDKLVKKSNNKKENKNLLSIEEYYKNAQVSSSKGDKKAIKKYQNKVTNAYLEYLENTFTEIIDFSKFNLNYDEIKTKIEERKDNKSKIIIDSISTNINITNDIEYIISIFALLNSNTYINKIRNRFFATSVWLEKQNGTKEYDYENIISILDEVLLINLLRENNITDILDLKNAIIDAKIVENDETYIKNYIFESNEEKLKKRLFCEELVDKEDIRKIFEDENFKFKSFIKKNEIGNFKINFGILSNLECNSEVEAKKIIGKNSKKLESFIQNIIDEYKSNIRTLFSSEFLEKYKEEIDNLVEDTESENKNKFEKIYYPKEHKNELYIYKKNLFLNIGNPNFDKIYGLISKDIKNVDTKILFDDDIKKNKISEIDAILKNLNDKLNGYSNDYKAKYVNKLKENDDFFAKNIQNENYSSFGEFEKDYNKVSEYKKIRDLVEFNYLNKIESYLIDINWKLAIQMARFERDMHYIVNGLRELGIIKLSGYNTGISRAYPKRNGSDGFYTTTAYYKFFDEESYKKFEKICYGFGIDLSENSEINKPENESIRNYISHFYIVRNPFADYSIAEQIDRVSNLLSYSTRYNNSTYASVFEVFKKDVNLDYDELKKKFRLIGNNDILERLMKPKKVSVLELESYNSDYIKNLIIELLTKIENTNDTL

SEQ ID NO: 29 - protein, 1152 aa, Artificial Sequence
  Chemically Synthesized
MKVTKVDGISHKKYIEEGKLVKSTSEENRTSERLSELLSIRLDIYIKNPDNASEEENRIRRENLKKFFSNKVLHLKDSVLYLKNRKEKNAVQDKNYSEEDISEYDLKNKNSFSVLKKILLNEDVNSEELEIFRKDVEAKLNKINSLKYSFEENKANYQKINENNVEKVGGKSKRNIIYDYYRESAKRNDYINNVQEAFDKLYKKEDIEKLFFLIENSKKHEKYKIREYYHKIIGRKNDKENFAKIIYEEIQNVNNIKELIEKIPDMSELKKSQVFYKYYLDKEELNDKNIKYAFCHFVEIEMSQLLKNYVYKRLSNISNDKIKRIFEYQNLKKLIENKLLNKLDTYVRNCGKYNYYLQVGEIATSDFIARNRQNEAFLRNIIGVSSVAYFSLRNILETENENDITGRMRGKTVKNNKGEEKYVSGEVDKIYNENKQNEVKENLKMFYSYDFNMDNKNEIEDFFANIDEAISSIRHGIVHFNLELEGKDIFAFKNIAPSEISKKMFQNEINEKKLKLKIFKQLNSANVFNYYEKDVIIKYLKNTKFNFVNKNIPFVPSFTKLYNKIEDLRNTLKFFWSVPKDKEEKDAQIYLLKNIYYGEFLNKFVKNSKVFFKITNEVIKINKQRNQKTGHYKYQKFENIEKTVPVEYLAIIQSREMINNQDKEEKNTYIDFIQQIFLKGFIDYLNKNNLKYIESNNNNDNNDIFSKIKIKKDNKEKYDKILKNYEKHNRNKEIPHEINEFVREIKLGKILKYTENLNMFYLILKLLNHKELTNLKGSLEKYQSANKEETFSDELELINLLNLDNNRVTEDFELEANEIGKFLDFNENKIKDRKELKKFDTNKIYFDGENIIKHRAFYNIKKYGMLNLLEKIADKAKYKISLKELKEYSNKKNEIEKNYTMQQNLHRKYARPKKDEKFNDEDYKEYEKAIGNIQKYTHLKNKVEFNELNLLQGLLLKILHRLVGYTSIWERDLRFRLKGEFPENHYIEEIFNFDNSKNVKYKSGQIVEKYINFYKELYKDNVEKRSIYSDKKVKKLKQEKKDLYIRNYIAHFNYIPHAEISLLEVLENLRKLLSYDRKLKNAIMKSIVDILKEYGFVATFKIGADKKIEIQTLESEKIVHLKNLKKKKLMTDRNSEELCELVKVMFEYKALE

SEQ ID NO: 30 - protein, 1152 aa, Artificial Sequence; identical to SEQ ID NO: 29
  Chemically Synthesized

SEQ ID NO: 31 - protein, 970 aa, Artificial Sequence
  Chemically Synthesized
MLALLHQEVPSQKLHNLKSLNTESLTKLFKPKFQNMISYPPSKGAEHVQFCLTDIAVPAIRDLDEIKPDWGIFFEKLKPYTDWAESYIHYKQTTIQKSIEQNKIQSPDSPRKLVLQKYVTAFLNGEPLGLDLVAKKYKLADLAESFKVVDLNEDKSANYKIKACLQQHQRNILDELKEDPELNQYGIEVKKYIQRYFPIKRAPNRSKHARADFLKKELIESTVEQQFKNAVYHYVLEQGKMEAYELTDPKTKDLQDIRSGEAFSFKFINACAFASNNLKMILNPECEKDILGKGDFKKNLPNSTTQSDVVKKMIPFFSDEIQNVNFDEAIWAIRGSIQQIRNEVYHCKKHSWKSILKIKGFEFEPNNMKYTDSDMQKLMDKDIAKIPDFIEEKLKSSGIIRFYSHDKLQSIWEMKQGFSLLTTNAPFVPSFKRVYAKGHDYQTSKNRYYDLGLTTFDILEYGEEDFRARYFLTKLVYYQQFMPWFTADNNAFRDAANFVLRLNKNRQQDAKAFINIREVEEGEMPRDYMGYVQGQIAIHEDSTEDTPNHFEKFISQVFIKGFDSHMRSADLKFIKNPRNQGLEQSEIEEMSFDIKVEPSFLKNKDDYIAFWTFCKMLDARHLSELRNEMIKYDGHLTGEQEIIGLALLGVDSRENDWKQFFSSEREYEKIMKGYVGEELYQREPYRQSDGKTPILFRGVEQARKYGTETVIQRLFDASPEFKVSKCNITEWERQKETIEETIERRKELHNEWEKNPKKPQNNAFFKEYKECCDAIDAYNWHKNKTTLVYVNELHHLLIEILGRYVGYVAIADRDFQCMANQYFKHSGITERVEYWGDNRLKSIKKLDTFLKKEGLFVSEKNARNHIAHLNYLSLKSECTLLYLSERLREIFKYDRKLKNAVSKSLIDILDRHGMSVVFANLKENKHRLVIKSLEPKKLRHLGEKKIDNGYIETNQVSEEYCGIVKRLLEI

SEQ ID NO: 32 - protein, 1124 aa, Artificial Sequence
  Chemically Synthesized
MEDDKKTTGSISYELKDKHFWAAFLNLARHNVYITINHINKLLEIREIDNDEKVLDIKTLWQKGNKDLNQKARLRELMTKHFPFLETAIYTKNKEDKKEVKQEKQAEAQSLESLKDCLFLFLDKLQEARNYYSHYKYSEFSKEPEFEEGLLEKMYNIFGNNIQLVINDYQHNKDINPDEDFKHLDRKGQFKYSFADNEGNITESGLLFFVSLFLEKKDAIWMQQKLNGFKDNLENKKKMTHEVFCRSRILMPKLRLESTQTQDWILLDMLNELIRCPKSLYERLQGDDREKFKVPFDPADEDYNAEQEPFKNTLIRHQDRFPYFVLRYFDYNEIFKNLRFQIDLGTYHFSIYKKLIGGQKEDRHLTHKLYGFERIQEFAKQNRPDEWKAIVKDLDTYETSNKRYISETTPHYHLENQKIGIRFRNGNKEIWPSLKTNDENNEKSKYKLDKQYQAEAFLSVHELLPMMFYYLLLKKEKPNNDEINASIVEGFIKREIRNIFKLYDAFANGEINNIDDLEKYCADKGIPKRHLPKQMVAILYDEHKDMVKEAKRKQKEMVKDTKKLLATLEKQTQKEKEDDGRNVKLLKSGEIARWLVNDMMRFQPVQKDNEGKPLNNSKANSTEYQMLQRSLALYNNEEKPTRYFRQVNLIESNNPHPFLKWTKWEECNNILTFYYSYLTKKIEFLNKLKPEDWKKNQYFLKLKEPKTNRETLVQGWKNGFNLPRGIFTEPIREWFKRHQNNSKEYEKVEALDRVGLVTKVIPLFFKEEYFKDKEENFKEDTQKEINDCVQPFYNFPYNVGNIHKPKEKDFLHREERIELWDKKKDKFKGYKEKIKSKKLTEKDKEEFRSYLEFQSWNKFERELRLVRNQDIVTWLLCKELIDKLKIDELNIEELKKLRLNNIDTDTAKKEKNNILNRVMPMELPVTVYEIDDSHKIVKDKPLHTIYIKEAETKLLKQGNFKALVKDRRLNGLFSFVKTNSEAESKRNPISKLRVEYELGEYQEARIEIIQDMLALEEKLINKYKDLPTNKFSEMLNSWLEGKDEADKARFQNDVDFLIAVRNAFSHNQYPMHNKIEFANIKPFSLYTANNSEEKGLGIANQLKDKTKETTDKIKKIEKPIETKE

SEQ ID NO: 33 - protein, 1127 aa, Artificial Sequence
  Chemically Synthesized
MQKQDKLFVDRKKNAIFAFPKYITIMENKEKPEPIYYELTDKHFWAAFLNLARHNVYTTINHINRRLEIAELKDDGYMMGIKGSWNEQAKKLDKKVRLRDLIMKHFPFLEAAAYEMTNSKSPNNKEQREKEQSEALSLNNLKNVLFIFLEKLQVLRNYYSHYKYSEESPKPIFETSLLKNMYKVFDANVRLVKRDYMHHENIDMQRDFTHLNRKKQVGRTKNIIDSPNFHYHFADKEGNMTIAGLLFFVSLFLDKKDAIWMQKKLKGFKDGRNLREQMTNEVFCRSRISLPKLKLENVQTKDWMQLDMLNELVRCPKSLYERLREKDRESFKVPFDIFSDDYNAEEEPFKNTLVRHQDRFPYFVLRYFDLNEIFEQLRFQIDLGTYHFSIYNKRIGDEDEVRHLTHHLYGFARIQDFAPQNQPEEWRKLVKDLDHFETSQEPYISKTAPHYHLENEKIGIKFCSAHNNLFPSLQTDKTCNGRSKFNLGTQFTAEAFLSVHELLPMMFYYLLLTKDYSRKESADKVEGIIRKEISNIYAIYDAFANNEINSIADLTRRLQNTNILQGHLPKQMISILKGRQKDMGKEAERKIGEMIDDTQRRLDLLCKQTNQKIRIGKRNAGLLKSGKIADWLVNDMMRFQPVQKDQNNIPINNSKANSTEYRMLQRALALFGSENFRLKAYFNQMNLVGNDNPHPFLAETQWEHQTNILSFYRNYLEARKKYLKGLKPQNWKQYQHFLILKVQKTNRNTLVTGWKNSFNLPRGIFTQPIREWFEKHNNSKRIYDQILSFDRVGFVAKAIPLYFAEEYKDNVQPFYDYPFNIGNRLKPKKRQFLDKKERVELWQKNKELFKNYPSEKKKTDLAYLDFLSWKKFERELRLIKNQDIVTWLMFKELFNMATVEGLKIGEIHLRDIDTNTANEESNNILNRIMPMKLPVKTYETDNKGNILKERPLATFYIEETETKVLKQGNFKALVKDRRLNGLFSFAETTDLNLEEHPISKLSVDLELIKYQTTRISIFEMTLGLEKKLIDKYSTLPTDSFRNMLERWLQCKANRPELKNYVNSLIAVRNAFSHNQYPMYDATLFAEVKKFTLFPSVDTKKIELNIAPQLLEIVGKAIKEIEKSENKN

SEQ ID NO: 34 - protein, 1119 aa, Artificial Sequence
  Chemically Synthesized
MTEQNEKPYNGTYYTLEDKHFWAAFLNLARHNAYITLAHIDRQLAYSKADITNDEDILFFKGQWKNLDNDLERKARLRSLILKHFSFLEGAAYGKKLFESQSSGNKSSKKKELSKKEKEELQANALSLDNLKSILFDFLQKLKDFRNYYSHYRHPESSELPLFDGNMLQRLYNVFDVSVQRVKRDHEHNDKVDPHRHFNHLVRKGKKDKYGNNDNPFFKHHFVDREGTVTEAGLLFFVSLFLEKRDAIWMQKKIRGFKGGTEAYQQMTNEVFCRSRISLPKLKLESLRTDDWMLLDMLNELVRCPKSLYDRLREEDRARFRVPVDILSDEDDTDGTEEDPFKNTLVRHQDRFPYFALRYFDLKKVFTSLRFHIDLGTYHFAIYKKNIGEQPEDRHLTRNLYGFGRIQDFAEEHRPEEWKRLVRDLDYFETGDKPYITQTTPHYHIEKGKIGLRFVPEGQHLWPSPEVGATRTGRSKYAQDKRLTAEAFLSVHELMPMMFYYFLLREKYSEEVSAEKVQGRIKRVIEDVYAVYDAFARDEINTRDELDACLADKGIRRGHLPRQMIAILSQEHKDMEEKVRKKLQEMIADTDHRLDMLDRQTDRKIRIGRKNAGLPKSGVVADWLVRDMMRFQPVAKDTSGKPLNNSKANSTEYRMLQRALALFGGEKERLTPYFRQMNLTGGNNPHPFLHETRWESHTNILSFYRSYLEARKAFLQSIGRSDRVENHRFLLLKEPKTDRQTLVAGWKGEFHLPRGIFTEAVRDCLIEMGYDEVGSYKEVGFMAKAVPLYFERASKDRVQPFYDYPFNVGNSLKPKKGRFLSKEKRAEEWESGKERFRLAKLKKEILEAKEHPYHDFKSWQKFERELRLVKNQDIITWMMCRDLMEENKVEGLDTGTLYLKDIRTDVQEQGSLNVLNRVKPMRLPVVVYRADSRGHVHKEQAPLATVYIEERDTKLLKQGNFKSFVKDRRLNGLFSFVDTGALAMEQYPISKLRVEYELAKYQTARVCAFEQTLELEESLLTRYPHLPDKNFRKMLESWSDPLLDKWPDLHGNVRLLIAVRNAFSHNQYPMYDETLFSSIRKYDPSSPDAIEERMGLNIAHRLSEEVKQAKEMVERIIQA

SEQ ID NO: 35 - protein, 1175 aa, Artificial Sequence
  Chemically Synthesized
MTEQSERPYNGTYYTLEDKHFWAAFLNLARHNAYITLTHIDRQLAYSKADITNDQDVLSFKALWKNFDNDLERKSRLRSLILKHFSFLEGAAYGKKLFESKSSGNKSSKNKELTKKEKEELQANALSLDNLKSILFDFLQKLKDFRNYYSHYRHSGSSELPLFDGNMLQRLYNVFDVSVQRVKIDHEHNDEVDPHYHFNHLVRKGKKDRYGHNDNPSFKHHFVDGEGMVTEAGLLFFVSLFLEKRDAIWMQKKIRGFKGGTETYQQMTNEVFCRSRISLPKLKLESLRMDDWMLLDMLNELVRCPKPLYDRLREDDRACFRVPVDILPDEDDTDGGGEDPFKNTLVRHQDRFPYFALRYFDLKKVFTSLRFHIDLGTYHFAIYKKMIGEQPEDRHLTRNLYGFGRIQDFAEEHRPEEWKRLVRDLDYFETGDKPYISQTSPHYHIEKGKIGLRFMPEGQHLWPSPEVGTTRTGRSKYAQDKRLTAEAFLSVHELMPMMFYYFLLREKYSEEVSAERVQGRIKRVIEDVYAVYDAFARDEINTRDELDACLADKGIRRGHLPRQMIAILSQEHKDMEEKIRKKLQEMMADTDHRLDMLDRQTDRKIRIGRKNAGLPKSGVIADWLVRDMMRFQPVAKDASGKPLNNSKANSTEYRMLQRALALFGGEKERLTPYFRQMNLTGGNNPHPFLHETRWESHTNILSFYRSYLRARKAFLERIGRSDRVENRPFLLLKEPKTDRQTLVAGWKGEFHLPRGIFTEAVRDCLIEMGHDEVASYKEVGFMAKAVPLYFERACEDRVQPFYDSPFNVGNSLKPKKGRFLSKEERAEEWERGKERFRDLEAWSYSAARRIEDAFAGIEYASPGNKKKIEQLLRDLSLWEAFESKLKVRADRINLAKLKKEILEAQEHPYHDFKSWQKFERELRLVKNQDIITWMMCRDLMEENKVEGLDTGTLYLKDIRPNVQEQGSLNVLNRVKPMRLPVVVYRADSRGHVHKEEAPLATVYIEERDTKLLKQGNFKSFVKDRRLNGLFSFVDTGGLAMEQYPISKLRVEYELAKYQTARVCVFELTLRLEESLLTRYPHLPDESFREMLESWSDPLLAKWPELHGKVRLLIAVRNAFSHNQYPMYDEAVFSSIRKYDPSSPDAIEERMGLNIAHRLSEEVKQAKETVERIIQA

SEQ ID NO: 36 - protein, 1120 aa, Artificial Sequence
  Chemically Synthesized
MEDDKKTTDSIRYELKDKHFWAAFLNLARHNVYITVNHINKILEEDEINRDGYENTLENSWNEIKDINKKDRLSKLIIKHFPFLEATTYRQNPTDTTKQKEEKQAEAQSLESLKKSFFVFIYKLRDLRNHYSHYKHSKSLERPKFEEDLQNKMYNIFDVSIQFVKEDYKHNTDINPKKDFKHLDRKRKGKFHYSFADNEGNITESGLLFFVSLFLEKKDAIWVQKKLEGFKCSNKSYQKMTNEVFCRSRMLLPKLRLESTQTQDWILLDMLNELIRCPKSLYERLQGVNRKKFYVSFDPADEDYDAEQEPFKNTLVRHQDRFPYFALRYFDYNEVFANLRFQIDLGTYHFSIYKKLIGGQKEDRHLTHKLYGFERIQEFDKQNRPDEWKAIVKDSDTFKKKEEKEEEKPYISETTPHYHLENKKIGIAFKNHNIWPSTQTELTNNKRKKYNLGTSIKAEAFLSVHELLPMMFYYLLLKTENTKNDNKVGGKKETKKQGKHKIEAIIESKIKDIYALYDAFANGEINSEDELKEYLKGKDIKIVHLPKQMIAILKNEHKDMAEKAEAKQEKMKLATENRLKTLDKQLKGKIQNGKRYNSAPKSGEIASWLVNDMMRFQPVQKDENGESLNNSKANSTEYQLLQRTLAFFGSEHERLAPYFKQTKLIESSNPHPFLNDTEWEKCSNILSFYRSYLKARKNFLESLKPEDWEKNQYFLMLKEPKTNRETLVQGWKNGFNLPRGFFTEPIRKWFMEHWKSIKVDDLKRVGLVAKVTPLFFSEKYKDSVQPFYNYPFNVGDVNKPKEEDFLHREERIELWDKKKDKFKGYKAKKKFKEMTDKEKEEHRSYLEFQSWNKFERELRLVRNQDIVTWLLCTELIDKLKIDELNIKELKKLRLKDINTDTAKKEKNNILNRVMPMELPVTVYKVNKGGYIIKNKPLHTIYIKEAETKLLKQGNFKALVKDRRLNGLFSFVKTPSEAESESNPISKLRVEYELGKYQNARLDIIEDMLALEKKLIDKYNSLDTDNFHNMLTGWLELKGEAKKARFQNDVKLLTAVRNAFSHNQYPMYDENLFGNIERFSLSSSNIIESKGLDIAAKLKEEVSKAAKKIQNEEDNKKEKET

SEQ ID NO: 37 - protein, 1132 aa, Artificial Sequence
  Chemically Synthesized
MEDDKKTKESTNMLDNKHFWAAFLNLARHNVYITVNHINKVLELKNKKDQDIIIDNDQDILAIKTHWEKVNGDLNKTERLRELMTKHFPFLETAIYTKNKEDKEEVKQEKQAKAQSFDSLKHCLFLFLEKLQEARNYYSHYKYSESTKEPMLEKELLKKMYNIFDDNIQLVIKDYQHNKDINPDEDFKHLDRTEEEFNYYFTTNKKGNITASGLLFFVSLFLEKKDAIWMQQKLRGFKDNRESKKKMTHEVFCRSRMLLPKLRLESTQTQDWILLDMLNELIRCPKSLYERLQGEYRKKFNVPFDSADEDYDAEQEPFKNTLVRHQDRFPYFALRYFDYNEIFTNLRFQIDLGTYHFSIYKKLIGGQKEDRHLTHKLYGFERIQEFAKQNRTDEWKAIVKDFDTYETSEEPYISETAPHYHLENQKIGIRFRNDNDEIWPSLKTNGENNEKRKYKLDKQYQAEAFLSVHELLPMMFYYLLLKKEEPNNDKKNASIVEGFIKREIRDIYKLYDAFANGEINNIDDLEKYCEDKGIPKRHLPKQMVAILYDEHKDMAEEAKRKQKEMVKDTKKLLATLEKQTQGEIEDGGRNIRLLKSGEIARWLVNDMMRFQPVQKDNEGNPLNNSKANSTEYQMLQRSLALYNKEEKPTRYFRQVNLINSSNPHPFLKWTKWEECNNILSFYRSYLTKKIEFLNKLKPEDWEKNQYFLKLKEPKTNRETLVQGWKNGFNLPRGIFTEPIREWFKRHQNDSEEYEKVETLDRVGLVTKVIPLFFKKEDSKDKEEYLKKDAQKEINNCVQPFYGFPYNVGNIHKPDEKDFLPSEERKKLWGDKKYKFKGYKAKVKSKKLTDKEKEEYRSYLEFQSWNKFERELRLVRNQDIVTWLLCTELIDKLKVEGLNVEELKKLRLKDIDTDTAKQEKNNILNRVMPMQLPVTVYEIDDSHNIVKDRPLHTVYIEETKTKLLKQGNFKALVKDRRLNGLFSFVDTSSETELKSNPISKSLVEYELGEYQNARIETIKDMLLLEETLIEKYKTLPTDNFSDMLNGWLEGKDEADKARFQNDVKLLVAVRNAFSHNQYPMRNRIAFANINPFSLSSADTSEEKKLDIANQLKDKTHKIIKRIIEIEKPIETKE

SEQ ID NO: 38 - protein, 1126 aa, Artificial Sequence
  Chemically Synthesized
MEDDKKTTDSIRYELKDKHFWAAFLNLARHNVYITVNHINKILEEGEINRDGYETTLKNTWNEIKDINKKDRLSKLIIKHFPFLEAATYRLNPTDTTKQKEEKQAEAQSLESLRKSFFVFIYKLRDLRNHYSHYKHSKSLERPKFEEGLLEKMYNIFNASIRLVKEDYQYNKDINPDEDFKHLDRTEEEFNYYFTKDNEGNITESGLLFFVSLFLEKKDAIWMQQKLRGFKDNRENKKKMTNEVFCRSRMLLPKLRLQSTQTQDWILLDMLNELIRCPKSLYERLREEDREKFRVPIEIADEDYDAEQEPFKNTLVRHQDRFPYFALRYFDYNEIFTNLRFQIDLGTYHFSIYKKQIGDYKESHHLTHKLYGFERIQEFTKQNRPDEWRKFVKTFNSFETSKEPYIPETTPHYHLENQKIGIRFRNDNDKIWPSLKTNSEKNEKSKYKLDKSFQAEAFLSVHELLPMMFYYLLLKTENTDNDNEIETKKKENKNDKQEKHKIEEIIENKITEIYALYDTFANGEIKSIDELEEYCKGKDIEIGHLPKQMIAILKDEHKVMATEAERKQEEMLVDVQKSLESLDNQINEEIENVERKNSSLKSGKIASWLVNDMMRFQPVQKDNEGKPLNNSKANSTEYQLLQRTLAFFGSEHERLAPYFKQTKLIESSNPHPFLKDTEWEKCNNILSFYRSYLEAKKNFLESLKPEDWEKNQYFLKLKEPKTKPKTLVQGWKNGFNLPRGIFTEPIRKWFMKHRENITVAELKRVGLVAKVIPLFFSEEYKDSVQPFYNYHFNVGNINKPDEKNFLNCEERRELLRKKKDEFKKMTDKEKEENPSYLEFKSWNKFERELRLVRNQDIVTWLLCMELFNKKKIKELNVEKIYLKNINTNTTKKEKNTEEKNGEEKNIKEKNNILNRIMPMRLPIKVYGRENFSKNKKKKIRRNTFFTVYIEEKGTKLLKQGNFKALERDRRLGGLFSFVKTPSKAESKSNTISKLRVEYELGEYQKARIEIIKDMLALEKTLIDKYNSLDTDNFNKMLTDWLELKGEPDKASFQNDVDLLIAVRNAFSHNQYPMRNRIAFANINPFSLSSANTSEEKGLGIANQLKDKTHKTIEKIIEIEKPIETKE

SEQ ID NO: 39 - protein, 1154 aa, Artificial Sequence
  Chemically Synthesized
MRVSKVKVKDGGKDKMVLVHRKTTGAQLVYSGQPVSNETSNILPEKKRQSFDLSTLNKTIIKFDTAKKQKLNVDQYKIVEKIFKYPKQELPKQIKAEEILPFLNHKFQEPVKYWKNGKEESFNLTLLIVEAVQAQDKRKLQPYYDWKTWYIQTKSDLLKKSIENNRIDLTENLSKRKKALLAWETEFTASGSIDLTHYHKVYMTDVLCKMLQDVKPLTDDKGKINTNAYHRGLKKALQNHQPAIFGTREVPNEANRADNQLSIYHLEVVKYLEHYFPIKTSKRRNTADDIAHYLKAQTLKTTIEKQLVNAIRANIIQQGKTNHHELKADTTSNDLIRIKTNEAFVLNLTGTCAFAANNIRNMVDNEQTNDILGKGDFIKSLLKDNTNSQLYSFFFGEGLSTNKAEKETQLWGIRGAVQQIRNNVNHYKKDALKTVFNISNFENPTITDPKQQTNYADTIYKARFINELEKIPEAFAQQLKTGGAVSYYTIENLKSLLTTFQFSLCRSTIPFAPGFKKVFNGGINYQNAKQDESFYELMLEQYLRKENFAEESYNARYFMLKLIYNNLFLPGFTTDRKAFADSVGFVQMQNKKQAEKVNPRKKEAYAFEAVRPMTAADSIADYMAYVQSELMQEQNKKEEKVAEETRINFEKFVLQVFIKGFDSFLRAKEFDFVQMPQPQLTATASNQQKADKLNQLEASITADCKLTPQYAKADDATHIAFYVFCKLLDAAHLSNLRNELIKFRESVNEFKFHHLLEIIEICLLSADVVPTDYRDLYSSEADCLARLRPFIEQGADITNWSDLFVQSDKHSPVIHANIELSVKYGTTKLLEQIINKDTQFKTTEANFTAWNTAQKSIEQLIKQREDHHEQWVKAKNADDKEKQERKREKSNFAQKFIEKHGDDYLDICDYINTYNWLDNKMHFVHLNRLHGLTIELLGRMAGFVALFDRDFQFFDEQQIADEFKLHGFVNLHSIDKKLNEVPTKKIKEIYDIRNKIIQINGNKINESVRANLIQFISSKRNYYNNAFLHVSNDEIKEKQMYDIRNHIAHFNYLTKDAADFSLIDLINELRELLHYDRKLKNAVSKAFIDLFDKHGMILKLKLNADHKLKVESLEPKKIYHLGSSAKDKPEYQYCTNQVMMAYCNMCRSLLEMKK

SEQ ID NO: 40 - protein, 1151 aa, Artificial Sequence
  Chemically Synthesized
MEDKPFWAAFFNLARHNVYLTVNHINKLLDLEKLYDEGKHKEIFEREDIFNISDDVMNDANSNGKKRKLDIKKIWDDLDTDLTRKYQLRELILKHFPFIQPAIIGAQTKERTTIDKDKRSTSTSNDSLKQTGEGDINDLLSLSNVKSMFFRLLQILEQLRNYYSHVKHSKSATMPNFDEDLLNWMRYIFIDSVNKVKEDYSSNSVIDPNTSFSHLIYKDEQGKIKPCRYPFTSKDGSINAFGLLFFVSLFLEKQDSIWMQKKIPGFKKASENYMKMTNEVFCRNHILLPKIRLETVYDKDWMLLDMLNEVVRCPLSLYKRLTPAAQNKFKVPEKSSDNANRQEDDNPFSRILVRHQNRFPYFVLRFFDLNEVFTTLRFQINLGCYHFAICKKQIGDKKEVHHLIRTLYGFSRLQNFTQNTRPEEWNTLVKTTEPSSGNDGKTVQGVPLPYISYTIPHYQIENEKIGIKIFDGDTAVDTDIWPSVSTEKQLNKPDKYTLTPGFKADVFLSVHELLPMMFYYQLLLCEGMLKTDAGNAVEKVLIDTRNAIFNLYDAFVQEKINTITDLENYLQDKPILIGHLPKQMIDLLKGHQRDMLKAVEQKKAMLIKDTERRLKLLDKQLKQETDVAAKNTGTLLKNGQIADWLVNDMMRFQPVKRDKEGNPINCSKANSTEYQMLQRAFAFYATDSCRLSRYFTQLHLIHSDNSHLFLSRFEYDKQPNLIAFYAAYLKAKLEFLNELQPQNWASDNYFLLLRAPKNDRQKLAEGWKNGFNLPRGLFTEKIKTWFNEHKTIVDISDCDIFKNRVGQVARLIPVFFDKKFKDHSQPFYRYDFNVGNVSKPTEANYLSKGKREELFKSYQNKFKNNIPAEKTKEYREYKNFSLWKKFERELRLIKNQDILIWLMCKNLFDEKIKPKKDILEPRIAVSYIKLDSLQTNTSTAGSLNALAKVVPMTLAIHIDSPKPKGKAGNNEKENKEFTVYIKEEGTKLLKWGNFKTLLADRRIKGLFSYIEHDDIDLKQHPLTKRRVDLELDLYQTCRIDIFQQTLGLEAQLLDKYSDLNTDNFYQMLIGWRKKEGIPRNIKEDTDFLKDVRNAFSHNQYPDSKKIAFRRIRKFNPKELILEEEEGLGIATQMYKEVEKVVNRIKRIELFD

SEQ ID NO: 41 - protein, 1322 aa, Artificial Sequence
  Chemically Synthesized
MSKECKKQRQEKKRRLQKANFSISLTGKHVFGAYFNMARTNFVKTINYILPIAGVRGNYSENQINKMLHALFLIQAGRNEELTTEQKQWEKKLRLNPEQQTKFQKLLFKHFPVLGPMMADVADHKAYLNKKKSTVQTEDETFAMLKGVSLADCLDIICLMADTLTECRNFYTHKDPYNKPSQLADQYLHQEMIAKKLDKVVVASRRILKDREGLSVNEVEFLTGIDHLHQEVLKDEFGNAKVKDGKVMKTFVEYDDFYFKISGKRLVNGYTVTTKDDKPVNVNTMLPALSDFGLLYFCVLFLSKPYAKLFIDEVRLFEYSPFDDKENMIMSEMLSIYRIRTPRLHKIDSHDSKATLAMDIFGELRRCPMELYNLLDKNAGQPFFHDEVKHPNSHTPDVSKRLRYDDRFPTLALRYIDETELFKRIRFQLQLGSFRYKFYDKENCIDGRVRVRRIQKEINGYGRMQEVADKRMDKWGDLIQKREERSVKLEHEELYINLDQFLEDTADSTPYVTDRRPAYNIHANRIGLYWEDSQNPKQYKVFDENGMYIPELVVTEDKKAPIKMPAPRCALSVYDLPAMLFYEYLREQQDNEFPSAEQVIIEYEDDYRKFFKAVAEGKLKPFKRPKEFRDFLKKEYPKLRMADIPKKLQLFLCSHGLCYNNKPETVYERLDRLTLQHLEERELHIQNRLEHYQKDRDMIGNKDNQYGKKSFSDVRHGALARYLAQSMMEWQPTKLKDKEKGHDKLTGLNYNVLTAYLATYGHPQVPEEGFTPRTLEQVLINAHLIGGSNPHPFINKVLALGNRNIEELYLHYLEEELKHIRSRIQSLSSNPSDKALSALPFIHHDRMRYHERTSEEMMALAARYTTIQLPDGLFTPYILEILQKHYTENSDLQNALSQDVPVKLNPTCNAAYLITLFYQTVLKDNAQPFYLSDKTYTRNKDGEKAESFSFKRAYELFSVLNNNKKDTFPFEMIPLFLTSDEIQERLSAKLLDGDGNPVPEVGEKGKPATDSQGNTIWKRRIYSEVDDYAEKLTDRDMKISFKGEWEKLPRWKQDKIIKRRDETRRQMRDELLQRMPRYIRDIKDNERTLRRYKTQDMVLFLLAEKMFTNIISEQSSEFNWKQMRLSKVCNEAFLRQTLTFRVPVTVGETTIYVEQENMSLKNYGEFYRFLTDDRLMSLLNNIVETLKPNENGDLVIRHTDLMSELAAYDQYRSTIFMLIQSIENLIITNNAVLDDPDADGFWVREDLPKRNNFASLLELINQLNNVELTDDERKLLVAIRNAFSHNSYNIDFSLIKDVKHLPEVAKGILQHLQSMLGVEITK

SEQ ID NO: 42 - protein, 1095 aa, Artificial Sequence
  Chemically Synthesized
MEKPLLPNVYTLKHKFFWGAFLNIARHNAFITICHINEQLGLKTPSNDDKIVDVVCETWNNILNNDHDLLKKSQLTELILKHFPFLTAMCYHPPKKEGKKKGHQKEQQKEKESEAQSQAEALNPSKLIEALEILVNQLHSLRNYYSHYKHKKPDAEKDIFKHLYKAFDASLRMVKEDYKAHFTVNLTRDFAHLNRKGKNKQDNPDFNRYRFEKDGFFTESGLLFFTNLFLDKRDAYWMLKKVSGFKASHKQREKMTTEVFCRSRILLPKLRLESRYDHNQMLLDMLSELSRCPKLLYEKLSEENKKHFQVEADGFLDEIEEEQNPFKDTLIRHQDRFPYFALRYLDLNESFKSIRFQVDLGTYHYCIYDKKIGDEQEKRHLTRTLLSFGRLQDFTEINRPQEWKALTKDLDYKETSNQPFISKTTPHYHITDNKIGFRLGTSKELYPSLEIKDGANRIAKYPYNSGFVAHAFISVHELLPLMFYQHLTGKSEDLLKETVRHIQRIYKDFEEERINTIEDLEKANQGRLPLGAFPKQMLGLLQNKQPDLSEKAKIKIEKLIAETKLLSHRLNTKLKSSPKLGKRREKLIKTGVLADWLVKDFMRFQPVAYDAQNQPIKSSKANSTEFWFIRRALALYGGEKNRLEGYFKQTNLIGNTNPHPFLNKFNWKACRNLVDFYQQYLEQREKFLEAIKNQPWEPYQYCLLLKIPKENRKNLVKGWEQGGISLPRGLFTEAIRETLSEDLMLSKPIRKEIKKHGRVGFISRAITLYFKEKYQDKHQSFYNLSYKLEAKAPLLKREEHYEYWQQNKPQSPTESQRLELHTSDRWKDYLLYKRWQHLEKKLRLYRNQDVMLWLMTLELTKNHFKELNLNYHQLKLENLAVNVQEADAKLNPLNQTLPMVLPVKVYPATAFGEVQYHKTPIRTVYIREEHTKALKMGNFKALVKDRRLNGLFSFIKEENDTQKHPISQLRLRRELEIYQSLRVDAFKETLSLEEKLLNKHTSLSSLENEFRALLEEWKKEYAASSMVTDEHIAFIASVRNAFCHNQYPFYKEALHAPIPLFTVAQPTTEEKDGLGIAEALLKVLREYCEIVKSQI

SEQ ID NO: 43 - protein, 1285 aa, Artificial Sequence
  Chemically Synthesized
MQIGKVQGRTISEFGDPAGGLKRKISTDGKNRKELPAHLSSDPKALIGQWISGIDKIYRKPDSRKSDGKAIHSPTPSKMQFDARDDLGEAFWKLVSEAGLAQDSDYDQFKRRLHPYGDKFQPADSGAKLKFEADPPEPQAFHGRWYGAMSKRGNDAKELAAALYEHLHVDEKRIDGQPKRNPKTDKFAPGLVVARALGIESSVLPRGMARLARNWGEEEIQTYFVVDVAASVKEVAKAAVSAAQAFDPPRQVSGRSLSPKVGFALAEHLERVTGSKRCSFDPAAGPSVLALHDEVKKTYKRLCARGKNAARAFPADKTELLALMRHTHENRVRNQMVRMGRVSEYRGQQAGDLAQSHYWTSAGQTEIKESEIFVRLWVGAFALAGRSMKAWIDPMGKIVNTEKNDRDLTAAVNIRQVISNKEMVAEAMARRGIYFGETPELDRLGAEGNEGFVFALLRYLRGCRNQTFHLGARAGFLKEIRKELEKTRWGKAKEAEHVVLTDKTVAAIRAIIDNDAKALGARLLADLSGAFVAHYASKEHFSTLYSEIVKAVKDAPEVSSGLPRLKLLLKRADGVRGYVHGLRDTRKHAFATKLPPPPAPRELDDPATKARYIALLRLYDGPFRAYASGITGTALAGPAARAKEAATALAQSVNVTKAYSDVMEGRSSRLRPPNDGETLREYLSALTGETATEFRVQIGYESDSENARKQAEFIENYRRDMLAFMFEDYIRAKGFDWILKIEPGATAMTRAPVLPEPIDTRGQYEHWQAALYLVMHFVPASDVSNLLHQLRKWEALQGKYELVQDGDATDQADARREALDLVKRFRDVLVLFLKTGEARFEGRAAPFDLKPFRALFANPATFDRLFMATPTTARPAEDDPEGDGASEPELRVARTLRGLRQIARYNHMAVLSDLFAKHKVRDEEVARLAEIEDETQEKSQIVAAQELRTDLHDKVMKCHPKTISPEERQSYAAAIKTIEEHRFLVGRVYLGDHLRLHRLMMDVIGRLIDYAGAYERDTGTFLINASKQLGAGADWAVTIAGAANTDARTQTRKDLAHFNVLDRADGTPDLTALVNRAREMMAYDRKRKNAVPRSILDMLARLGLTLKWQMKDHLLQDATITQAAIKHLDKVRLTVGGPAAVTEARFSQDYLQMVAAVFNGSVQNPKPRRRDDGDAWHKPPKPATAQSQPDQKPPNKAPSAGSRLPPPQVGEVYEGVVVKVIDTGSLGFLAVEGVAGNIGLHISRLRRIREDAIIVGRRYRFRVEIYVPPKSNTSKLNAADLVRID

SEQ ID NO: 44 - protein, 1285 aa, Artificial Sequence; identical to SEQ ID NO: 43
  Chemically Synthesized

SEQ ID NO: 45 - protein, 1285 aa, Artificial Sequence
  Chemically Synthesized
MQIGKVQGRTISEFGDPAGGLKRKISTDGKNRKELPAHLSSDPKALIGQWISGIDKIYRKPDSRKSDGKAIHSPTPSKMQFDARDDLGEAFWKLVSEAGLAQDSDYDQFKRRLHPYGDKFQPADSGAKLKFEADPPEPQAFHGRWYGAMSKRGNDAKELAAALYEHLHVDEKRIDGQPKRNPKTDKFAPGLVVARALGIESSVLPRGMARLARNWGEEEIQTYFVVDVAASVKEVAKAAVSAAQAFDPPRQVSGRSLSPKVGFALAEHLERVTGSKRCSFDPAAGPSVLALHDEVKKTYKRLCARGKNAARAFPADKTELLALMRHTHENRVRNQMVRMGRVSEYRGQQAGDLAQSHYWTSAGQTEIKESEIFVRLWVGAFALAGRSMKAWIDPMGKIVNTEKNDRDLTAAVNIRQVISNKEMVAEAMARRGIYFGETPELDRLGAEGNEGFVFALLRYLRGCRNQTFHLGARAGFLKEIRKELEKTRWGKAKEAEHVVLTDKTVAAIRAIIDNDAKALGARLLADLSGAFVAHYASKEHFSTLYSEIVKAVKDAPEVSSGLPRLKLLLKRADGVRGYVHGLRDTRKHAFATKLPPPPAPRELDDPATKARYIALLRLYDGPFRAYASGITGTALAGPAARAKEAATALAQSVNVTKAYSDVMEGRTSRLRPPNDGETLREYLSALTGETATEFRVQIGYESDSENARKQAEFIENYRRDMLAFMFEDYIRAKGFDWILKIEPGATAMTRAPVLPEPIDTRGQYEHWQAALYLVMHFVPASDVSNLLHQLRKWEALQGKYELVQDGDATDQADARREALDLVKRFRDVLVLFLKTGEARFEGRAAPFDLKPFRALFANPATFDRLFMATPTTARPAEDDPEGDGASEPELRVARTLRGLRQIARYNHMAVLSDLFAKHKVRDEEVARLAEIEDETQEKSQIVAAQELRTDLHDKVMKCHPKTISPEERQSYAAAIKTIEEHRFLVGRVYLGDHLRLHRLMMDVIGRLIDYAGAYERDTGTFLINASKQLGAGADWAVTIAGAANTDARTQTRKDLAHFNVLDRADGTPDLTALVNRAREMMAYDRKRKNAVPRSILDMLARLGLTLKWQMKDHLLQDATITQAAIKHLDKVRLTVGGPAAVTEARFSQDYLQMVAAVFNGSVQNPKPRRRDDGDAWHKPPKPATAQSQPDQKPPNKAPSAGSRLPPPQVGEVYEGVVVKVIDTGSLGFLAVEGVAGNIGLHISRLRRIREDAIIVGRRYRFRVEIYVPPKSNTSKLNAADLVRID

SEQ ID NO: 46 - protein, 922 aa, Artificial Sequence
  Chemically Synthesized
MAKKNKMKPRELREAQKKARQLKAAEINNNAAPAIAAMPAAEVIAPVAEKKKSSVKAAGMKSILVSENKMYITSFGKGNSAVLEYEVDNNDYNKTQLSSKDNSNIELGDVNEVNITFSSKHGFGSGVEINTSNPTHRSGESSPVRGDMLGLKSELEKRFFGKTFDDNIHIQLIYNILDIEKILAVYVTNIVYALNNMLGIKDSESYDDFMGYLSARNTYEVFTHPDKSNLSDKVKGNIKKSLSKFNDLLKTKRLGYFGLEEPKTKDTRASEAYKKRVYHMLAIVGQIRQCVFHDKSGAKRFDLYSFINNIDPEYRDTLDYLVEERLKSINKDFIEGNKVNISLLIDMMKGYEADDIIRLYYDFIVLKSQKNLGFSIKKLREKMLEEYGFRFKDKQYDSVRSKMYKLMDFLLFCNYYRNDVAAGEALVRKLRFSMTDDEKEGIYADEAAKLWGKFRNDFENIADHMNGDVIKELGKADMDFDEKILDSEKKNASDLLYFSKMIYMLTYFLDGKEINDLLTTLISKFDNIKEFLKIMKSSAVDVECELTAGYKLFNDSQRITNELFIVKNIASMRKPAASAKLTMFRDALTILGIDDNITDDRISEILKLKEKGKGIHGLRNFITNNVIESSRFVYLIKYANAQKIREVAKNEKVVMFVLGGIPDTQIERYYKSCVEFPDMNSSLEAKRSELARMIKNISFDDFKNVKQQAKGRENVAKERAKAVIGLYLTVMYLLVKNLVNVNARYVIAIHCLERDFGLYKEIIPELASKNLKNDYRILSQTLCELCDDRNESSNLFLKKNKRLRKCVEVDINNADSSMTRKYRNCIAHLTVVRELKEYIGDIRTVDSYFSIYHYVMQRCITKRGDDTKQEEKIKYEDDLLKNHGYTKDFVKALNSPFGYNIPRFKNLSIEQLFDRNEYLTEK

SEQ ID NO: 47 - protein, 968 aa, Artificial Sequence
  Chemically Synthesized
IEKKKSFAKGMGVKSTLVSGSKVYMTTFAEGSDARLEKIVEGDSIRSVNEGEAFSAEMADKNAGYKIGNAKFSHPKGYAVVANNPLYTGPVQQDMLGLKETLEKRYFGESADGNDNICIQVIHNILDIEKILAEYITNAAYAVNNISGLDKDIIGFGKFSTVYTYDEFKDPEHHRAAFNNNDKLINAIKAQYDEFDNFLDNPRLGYFGQAFFSKEGRNYIINYGNECYDILALLSGLRHWVVHNNEEESRISRTWLYNLDKNLDNEYISTLNYLYDRITNELTNSFSKNSAANVNYIAETLGINPAEFAEQYFRFSIMKEQKNLGFNITKLREVMLDRKDMSEIRKNHKVFDSIRTKVYTMMDFVIYRYYIEEDAKVAAANKSLPDNEKSLSEKDIFVINLRGSFNDDQKDALYYDEANRIWRKLENIMHNIKEFRGNKTREYKKKDAPRLPRILPAGRDVSAFSKLMYALTMFLDGKEINDLLTTLINKFDNIQSFLKVMPLIGVNAKFVEEYAFFKDSAKIADELRLIKSFARMGEPIADARRAMYIDAIRILGTNLSYDELKALADTFSLDENGNKLKKGKHGMRNFIINNVISNKRFHYLIRYGDPAHLHEIAKNEAVVKFVLGRIADIQKKQGQNGKNQIDRYYETCIGKDKGKSVSEKVDALTKIITGMNYDQFDKKRSVIEDTGRENAEREKFKKIISLYLTVIYHILKNIVNINARYVIGFHCVERDAQLYKEKGYDINLKKLEEKGFSSVTKLCAGIDETAPDKRKDVEKEMAERAKESIDSLESANPKLYANYIKYSDEKKAEEFTRQINREKAKTALNAYLRNTKWNVIIREDLLRIDNKTCTLFRNKAVHLEVARYVHAYINDIAEVNSYFQLYHYIMQRIIMNERYEKSSGKVSEYFDAVNDEKKYNDRLLKLLCVPFGYCIPRFKNLSIEALFDRNEAAKFDKEKKKVSGNSGS

SEQ ID NO: 48 - protein, 1089 aa, Artificial Sequence
  Chemically Synthesized
NIPALVENQKKYFGTYSVMAMLNAQTVLDHIQKVADIEGEQNENNENLWFHPVMSHLYNAKNGYDKQPEKTMFIIERLQSYFPFLKIMAENQREYSNGKYKQNRVEVNSNDIFEVLKRAFGVLKMYRDLTNAYKTYEEKLNDGCEFLTSTEQPLSGMINNYYTVALRNMNERYGYKTEDLAFIQDKRFKFVKDAYGKKKSQVNTGFFLSLQDYNGDTQKKLHLSGVGIALLICLFLDKQYINIFLSRLPIFSSYNAQSEERRIIIRSFGINSIKLPKDRIHSEKSNKSVAMDMLNEVKRCPDELFTTLSAEKQSRFRIISDDHNEVLMKRSSDRFVPLLLQYIDYGKLFDHIRFHVNMGKLRYLLKADKTCIDGQTRVRVIEQPLNGFGRLEEAETMRKQENGTFGNSGIRIRDFENMKRDDANPANYPYIVDTYTHYILENNKVEMFINDKEDSAPLLPVIEDDRYVVKTIPSCRMSTLEIPAMAFHMFLFGSKKTEKLIVDVHNRYKRLFQAMQKEEVTAENIASFGIAESDLPQKILDLISGNAHGKDVDAFIRLTVDDMLTDTERRIKRFKDDRKSIRSADNKMGKRGFKQISTGKLADFLAKDIVLFQPSVNDGENKITGLNYRIMQSAIAVYDSGDDYEAKQQFKLMFEKARLIGKGTTEPHPFLYKVFARSIPANAVEFYERYLIERKFYLTGLSNEIKKGNRVDVPFIRRDQNKWKTPAMKTLGRIYSEDLPVELPRQMFDNEIKSHLKSLPQMEGIDFNNANVTYLIAEYMKRVLDDDFQTFYQWNRNYRYMDMLKGEYDRKGSLQHCFTSVEEREGLWKERASRTERYRKQASNKIRSNRQMRNASSEEIETILDKRLSNSRNEYQKSEKVIRRYRVQDALLFLLAKKTLTELADFDGERFKLKEIMPDAEKGILSEIMPMSFTFEKGGKKYTITSEGMKLKNYGDFFVLASDKRIGNLLELVGSDIVSKEDIMEEFNKYDQCRPEISSIVFNLEKWAFDTYPELSARVDREEKVDFKSILKILLNNKNINKEQSDILRKIRNAFDANNYPDKGVVEIKALPEIAMSIKKAFGEYAIMK

SEQ ID NO: 49 - protein, 982 aa, Artificial Sequence
  Chemically Synthesized
NIPALVENQKKYFGTYSVMAMLNAQTVLDHIQKVADIEGEQNENNENLWFHPVMSHLYNAKNGYDKQPEKTMFIIERLQSYFPFLKIMAENQREYSNGKYKQNRVEVNSNDIFEVLKRAFGVLKMYRDLTNAYKTYEEKLNDGCEFLTSTEQPLSGMINNYYTVALRNMNERYGYKTEDLAFIQDKRFKFVKDAYGKKKSQVNTGFFLSLQDYNGDTQKKLHLSGVGIALLICLFLDKQYINIFLSRLPIFSSYNAQSEERRIIIRSFGINSIKLPKDRIHSEKSNKSVAMDMLNEVKRCPDELFTTLSAEKQSRFRIISDDHNEVLMKRSSDRFVPLLLQYIDYGKLFDHIRFHVNMGKLRYLLKADKTCIDGQTRVRVIEQPLNGFGRLEEAETMRKQENGTFGNSGIRIRDFENMKRDDANPANYPYIVDTYTHYILENNKVEMFINDKEDSAPLLPVIEDDRYVVKTIPSCRMSTLEIPAMAFHMFLFGSKKTEKLIVDVHNRYKRLFQAMQKEEVTAENIASFGIAESDLPQKILDLISGNAHGKDVDAFIRLTVDDMLTDTERRIKRFKDDRKSIRSADNKMGKRGFKQISTGKLADFLAKDIVLFQPSVNDGENKITGLNYRIMQSAIAVYDSGDDYEAKQQFKLMFEKARLIGKGTTEPHPFLYKVFARSIPANAVEFYERYLIERKFYLTGLSNEIKKGNRVDVPFIRRDQNKWKTPAMKTLGRIYSEDLPVELPRQMFDNEIKSHLKSLPQMEGIDFNNANVTYLIAEYMKRVLDDDFQTFYQWNRNYRYMDMLKGEYDRKGSLQHCFTSVEEREGLWKERASRTERYRKQASNKIRSNRQMRNASSEEIETILDKRLSNSRNEYQKSEKVIRRYRVQDALLFLLAKKTLTELADFDGERFKLKEIMPDAEKGILSEIMPMSFTFEKGGKKYTITSEGMKLKNYGDFFVLASDKRIGNLLELVGSDIVSKED

SEQ ID NO: 50 - protein, 39 aa, Artificial Sequence
  Chemically Synthesized
NSKKRSLEDNETEIKVSRDTWNTKNMRSLEPPRSKKRIH

SEQ ID NO: 51 - protein, 39 aa, Artificial Sequence
  Chemically Synthesized
KSKKRSLEDNETEIEVSRDTWNNKNMRSLEPPRSKKRIN

SEQ ID NO: 52 - protein, 43 aa, Artificial Sequence
  Chemically Synthesized
TMKKRDAETADIGDQSEVESDTEELKKIMFGEKKKLNKKKRKQ

SEQ ID NO: 53 - protein, 9 aa, Artificial Sequence
  Chemically Synthesized
PKKKRKVSS

SEQ ID NO: 54 - protein, 24 aa, Artificial Sequence
  Chemically Synthesized
DPKKKRKVDPKKKRKVDPKKKRKV

SEQ ID NO: 55 - protein, 16 aa, Artificial Sequence
  Chemically Synthesized
KRPAATKKAGQAKKKK

SEQ ID NO: 56 - protein, 37 aa, Artificial Sequence
  Chemically Synthesized
RQKKRVYYDDGLTEEQFLEAVEDDNMSLEDAIKKRRE

SEQ ID NO: 57 - protein, 33 aa, Artificial Sequence
  Chemically Synthesized
NVKKRKRRSKKINKLTDGQIRINHVSSEKKRRE

SEQ ID NO: 58 - protein, 11 aa, Artificial Sequence
  Chemically Synthesized
LQLPPLERLTL

SEQ ID NO: 59 - protein, 16 aa, Artificial Sequence
  Chemically Synthesized
GSLQLPPLERLTLGSS

SEQ ID NO: 60 - protein, 32 aa, Artificial Sequence
  Chemically Synthesized
MSVLTPLLLRGLTGSARRLPVPRAKIHSLGDP

SEQ ID NO: 61 - protein, 130 aa, Artificial Sequence
  Chemically Synthesized
MSVLTPLLLRGLTGSARRLPVPRAKIHSLGDPMSVLTPLLLRGLTGSARRLPVPRAKIHSLGKLATMSVLTPLLLRGLTGSARRLPVPRAKIHSLGDPMSVLTPLLLRGLTGSARRLPVPRAKIHSLGKL

SEQ ID NO: 62 - protein, 20 aa, Artificial Sequence
  Chemically Synthesized
MYRMQLLSCIALSLALVTNS

SEQ ID NO: 63 - protein, 43 aa, Artificial Sequence
  Chemically Synthesized
MGCCFSKTAAKGEAAAERPGEAAVASSPSKANGQENGHVKVGS

SEQ ID NO: 64 - protein, 17 aa, Artificial Sequence
  Chemically Synthesized
MLLPVPLLLGLLGAAAD

SEQ ID NO: 65 - protein, 9 aa, Artificial Sequence
  Chemically Synthesized
GITLGKDEL

SEQ ID NO: 66 - protein, 3 aa, Artificial Sequence
  Chemically Synthesized
SKL

SEQ ID NO: 67 - protein, 22 aa, Artificial Sequence
  Chemically Synthesized
DYKDHDGDYKDHDIDYKDDDDK

SEQ ID NO: 68 - protein, 1155 aa, Artificial Sequence
  Chemically Synthesized
MDYKDHDGDYKDHDIDYKDDDDKGGNSKKRSLEDNETEIKVSRDTWNTKNMRSLEPPRSKKRIHGGNIPALVENQKKYFGTYSVMAMLNAQTVLDHIQKVADIEGEQNENNENLWFHPVMSHLYNAKNGYDKQPEKTMFIIERLQSYFPFLKIMAENQREYSNGKYKQNRVEVNSNDIFEVLKRAFGVLKMYRDLTNHYKTYEEKLNDGCEFLTSTEQPLSGMINNYYTVALRNMNERYGYKTEDLAFIQDKRFKFVKDAYGKKKSQVNTGFFLSLQDYNGDTQKKLHLSGVGIALLICLFLDKQYINIFLSRLPIFSSYNAQSEERRIIIRSFGINSIKLPKDRIHSEKSNKSVAMDMLNEVKRCPDELFTTLSAEKQSRFRIISDDHNEVLMKRSSDRFVPLLLQYIDYGKLFDHIRFHVNMGKLRYLLKADKTCIDGQTRVRVIEQPLNGFGRLEEAETMRKQENGTFGNSGIRIRDFENMKRDDANPANYPYIVDTYTHYILENNKVEMFINDKEDSAPLLPVIEDDRYVVKTIPSCRMSTLEIPAMAFHMFLFGSKKTEKLIVDVHNRYKRLFQAMQKEEVTAENIASFGIAESDLPQKILDLISGNAHGKDVDAFIRLTVDDMLTDTERRIKRFKDDRKSIRSADNKMGKRGFKQISTGKLADFLAKDIVLFQPSVNDGENKITGLNYRIMQSAIAVYDSGDDYEAKQQFKLMFEKARLIGKGTTEPHPFLYKVFARSIPANAVEFYERYLIERKFYLTGLSNEIKKGNRVDVPFIRRDQNKWKTPAMKTLGRIYSEDLPVELPRQMFDNEIKSHLKSLPQMEGIDFNNANVTYLIAEYMKRVLDDDFQTFYQWNRNYRYMDMLKGEYDRKGSLQHCFTSVEEREGLWKERASRTERYRKQASNKIRSNRQMRNASSEEIETILDKRLSNSRNEYQKSEKVIRRYRVQDALLFLLAKKTLTELADFDGERFKLKEIMPDAEKGILSEIMPMSFTFEKGGKKYTITSEGMKLKNYGDFFVLASDKRIGNLLELVGSDIVSKEDIMEEFNKYDQCRPEISSIVFNLEKWAFDTYPELSARVDREEKVDFKSILKILLNNKNINKEQSDILRKIRNAFDHNNYPDKGVVEIKALPEIAMSIKKAFGEYAIMK

SEQ ID NO: 69 - protein, 1155 aa, Artificial Sequence
  Chemically Synthesized
MDYKDHDGDYKDHDIDYKDDDDKGGKSKKRSLEDNETEIEVSRDTWNNKNMRSLEPPRSKKRINGGNIPALVENQKKYFGTYSVMAMLNAQTVLDHIQKVADIEGEQNENNENLWFHPVMSHLYNAKNGYDKQPEKTMFIIERLQSYFPFLKIMAENQREYSNGKYKQNRVEVNSNDIFEVLKRAFGVLKMYRDLTNHYKTYEEKLNDGCEFLTSTEQPLSGMINNYYTVALRNMNERYGYKTEDLAFIQDKRFKFVKDAYGKKKSQVNTGFFLSLQDYNGDTQKKLHLSGVGIALLICLFLDKQYINIFLSRLPIFSSYNAQSEERRIIIRSFGINSIKLPKDRIHSEKSNKSVAMDMLNEVKRCPDELFTTLSAEKQSRFRIISDDHNEVLMKRSSDRFVPLLLQYIDYGKLFDHIRFHVNMGKLRYLLKADKTCIDGQTRVRVIEQPLNGFGRLEEAETMRKQENGTFGNSGIRIRDFENMKRDDANPANYPYIVDTYTHYILENNKVEMFINDKEDSAPLLPVIEDDRYVVKTIPSCRMSTLEIPAMAFHMFLFGSKKTEKLIVDVHNRYKRLFQAMQKEEVTAENIASFGIAESDLPQKILDLISGNAHGKDVDAFIRLTVDDMLTDTERRIKRFKDDRKSIRSADNKMGKRGFKQISTGKLADFLAKDIVLFQPSVNDGENKITGLNYRIMQSAIAVYDSGDDYEAKQQFKLMFEKARLIGKGTTEPHPFLYKVFARSIPANAVEFYERYLIERKFYLTGLSNEIKKGNRVDVPFIRRDQNKWKTPAMKTLGRIYSEDLPVELPRQMFDNEIKSHLKSLPQMEGIDFNNANVTYLIAEYMKRVLDDDFQTFYQWNRNYRYMDMLKGEYDRKGSLQHCFTSVEEREGLWKERASRTERYRKQASNKIRSNRQMRNASSEEIETILDKRLSNSRNEYQKSEKVIRRYRVQDALLFLLAKKTLTELADFDGERFKLKEIMPDAEKGILSEIMPMSFTFEKGGKKYTITSEGMKLKNYGDFFVLASDKRIGNLLELVGSDIVSKEDIMEEFNKYDQCRPEISSIVFNLEKWAFDTYPELSARVDREEKVDFKSILKILLNNKNINKEQSDILRKIRNAFDHNNYPDKGVVEIKALPEIAMSIKKAFGEYAIMK

SEQ ID NO: 70 - protein, 1127 aa, Artificial Sequence
  Chemically Synthesized
MDYKDHDGDYKDHDIDYKDDDDKGGLQLPPLERLTLGGNIPALVENQKKYFGTYSVMAMLNAQTVLDHIQKVADIEGEQNENNENLWFHPVMSHLYNAKNGYDKQPEKTMFIIERLQSYFPFLKIMAENQREYSNGKYKQNRVEVNSNDIFEVLKRAFGVLKMYRDLTNHYKTYEEKLNDGCEFLTSTEQPLSGMINNYYTVALRNMNERYGYKTEDLAFIQDKRFKFVKDAYGKKKSQVNTGFFLSLQDYNGDTQKKLHLSGVGIALLICLFLDKQYINIFLSRLPIFSSYNAQSEERRIIIRSFGINSIKLPKDRIHSEKSNKSVAMDMLNEVKRCPDELFTTLSAEKQSRFRIISDDHNEVLMKRSSDRFVPLLLQYIDYGKLFDHIRFHVNMGKLRYLLKADKTCIDGQTRVRVIEQPLNGFGRLEEAETMRKQENGTFGNSGIRIRDFENMKRDDANPANYPYIVDTYTHYILENNKVEMFINDKEDSAPLLPVIEDDRYVVKTIPSCRMSTLEIPAMAFHMFLFGSKKTEKLIVDVHNRYKRLFQAMQKEEVTAENIASFGIAESDLPQKILDLISGNAHGKDVDAFIRLTVDDMLTDTERRIKRFKDDRKSIRSADNKMGKRGFKQISTGKLADFLAKDIVLFQPSVNDGENKITGLNYRIMQSAIAVYDSGDDYEAKQQFKLMFEKARLIGKGTTEPHPFLYKVFARSIPANAVEFYERYLIERKFYLTGLSNEIKKGNRVDVPFIRRDQNKWKTPAMKTLGRIYSEDLPVELPRQMFDNEIKSHLKSLPQMEGIDFNNANVTYLIAEYMKRVLDDDFQTFYQWNRNYRYMDMLKGEYDRKGSLQHCFTSVEEREGLWKERASRTERYRKQASNKIRSNRQMRNASSEEIETILDKRLSNSRNEYQKSEKVIRRYRVQDALLFLLAKKTLTELADFDGERFKLKEIMPDAEKGILSEIMPMSFTFEKGGKKYTITSEGMKLKNYGDFFVLASDKRIGNLLELVGSDIVSKEDIMEEFNKYDQCRPEISSIVFNLEKWAFDTYPELSARVDREEKVDFKSILKILLNNKNINKEQSDILRKIRNAFDHNNYPDKGVVEIKALPEIAMSIKKAFGEYAIMK

SEQ ID NO: 71 - protein, 1132 aa, Artificial Sequence
  Chemically Synthesized
MDYKDHDGDYKDHDIDYKDDDDKGGGSLQLPPLERLTLGSSGGNIPALVENQKKYFGTYSVMAMLNAQTVLDHIQKVADIEGEQNENNENLWFHPVMSHLYNAKNGYDKQPEKTMFIIERLQSYFPFLKIMAENQREYSNGKYKQNRVEVNSNDIFEVLKRAFGVLKMYRDLTNHYKTYEEKLNDGCEFLTSTEQPLSGMINNYYTVALRNMNERYGYKTEDLAFIQDKRFKFVKDAYGKKKSQVNTGFFLSLQDYNGDTQKKLHLSGVGIALLICLFLDKQYINIFLSRLPIFSSYNAQSEERRIIIRSFGINSIKLPKDRIHSEKSNKSVAMDMLNEVKRCPDELFTTLSAEKQSRFRIISDDHNEVLMKRSSDRFVPLLLQYIDYGKLFDHIRFHVNMGKLRYLLKADKTCIDGQTRVRVIEQPLNGFGRLEEAETMRKQENGTFGNSGIRIRDFENMKRDDANPANYPYIVDTYTHYILENNKVEMFINDKEDSAPLLPVIEDDRYVVKTIPSCRMSTLEIPAMAFHMFLFGSKKTEKLIVDVHNRYKRLFQAMQKEEVTAENIASFGIAESDLPQKILDLISGNAHGKDVDAFIRLTVDDMLTDTERRIKRFKDDRKSIRSADNKMGKRGFKQISTGKLADFLAKDIVLFQPSVNDGENKITGLNYRIMQSAIAVYDSGDDYEAKQQFKLMFEKARLIGKGTTEPHPFLYKVFARSIPANAVEFYERYLIERKFYLTGLSNEIKKGNRVDVPFIRRDQNKWKTPAMKTLGRIYSEDLPVELPRQMFDNEIKSHLKSLPQMEGIDFNNANVTYLIAEYMKRVLDDDFQTFYQWNRNYRYMDMLKGEYDRKGSLQHCFTSVEEREGLWKERASRTERYRKQASNKIRSNRQMRNASSEEIETILDKRLSNSRNEYQKSEKVIRRYRVQDALLFLLAKKTLTELADFDGERFKLKEIMPDAEKGILSEIMPMSFTFEKGGKKYTITSEGMKLKNYGDFFVLASDKRIGNLLELVGSDIVSKEDIMEEFNKYDQCRPEISSIVFNLEKWAFDTYPELSARVDREEKVDFKSILKILLNNKNINKEQSDILRKIRNAFDHNNYPDKGVVEIKALPEIAMSIKKAFGEYAIMK

SEQ ID NO: 72 - protein, 1148 aa, Artificial Sequence
  Chemically Synthesized
MDYKDHDGDYKDHDIDYKDDDDKGGMSVLTPLLLRGLTGSARRLPVPRAKIHSLGDPGGNIPALVENQKKYFGTYSVMAMLNAQTVLDHIQKVADIEGEQNENNENLWFHPVMSHLYNAKNGYDKQPEKTMFIIERLQSYFPFLKIMAENQREYSNGKYKQNRVEVNSNDIFEVLKRAFGVLKMYRDLTNHYKTYEEKLNDGCEFLTSTEQPLSGMINNYYTVALRNMNERYGYKTEDLAFIQDKRFKFVKDAYGKKKSQVNTGFFLSLQDYNGDTQKKLHLSGVGIALLICLFLDKQYINIFLSRLPIFSSYNAQSEERRIIIRSFGINSIKLPKDRIHSEKSNKSVAMDMLNEVKRCPDELFTTLSAEKQSRFRIISDDHNEVLMKRSSDRFVPLLLQYIDYGKLFDHIRFHVNMGKLRYLLKADKTCIDGQTRVRVIEQPLNGFGRLEEAETMRKQENGTFGNSGIRIRDFENMKRDDANPANYPYIVDTYTHYILENNKVEMFINDKEDSAPLLPVIEDDRYVVKTIPSCRMSTLEIPAMAFHMFLFGSKKTEKLIVDVHNRYKRLFQAMQKEEVTAENIASFGIAESDLPQKILDLISGNAHGKDVDAFIRLTVDDMLTDTERRIKRFKDDRKSIRSADNKMGKRGFKQISTGKLADFLAKDIVLFQPSVNDGENKITGLNYRIMQSAIAVYDSGDDYEAKQQFKLMFEKARLIGKGTTEPHPFLYKVFARSIPANAVEFYERYLIERKFYLTGLSNEIKKGNRVDVPFIRRDQNKWKTPAMKTLGRIYSEDLPVELPRQMFDNEIKSHLKSLPQMEGIDFNNANVTYLIAEYMKRVLDDDFQTFYQWNRNYRYMDMLKGEYDRKGSLQHCFTSVEEREGLWKERASRTERYRKQASNKIRSNRQMRNASSEEIETILDKRLSNSRNEYQKSEKVIRRYRVQDALLFLLAKKTLTELADFDGERFKLKEIMPDAEKGILSEIMPMSFTFEKGGKKYTITSEGMKLKNYGDFFVLASDKRIGNLLELVGSDIVSKEDIMEEFNKYDQCRPEISSIVFNLEKWAFDTYPELSARVDREEKVDFKSILKILLNNKNINKEQSDILRKIRNAFDHNNYPDKGVVEIKALPEIAMSIKKAFGEYAIMK

SEQ ID NO: 73 - protein, 1246 aa, Artificial Sequence
  Chemically Synthesized
MDYKDHDGDYKDHDIDYKDDDDKGGMSVLTPLLLRGLTGSARRLPVPRAKIHSLGDPMSVLTPLLLRGLTGSARRLPVPRAKIHSLGKLATMSVLTPLLLRGLTGSARRLPVPRAKIHSLGDPMSVLTPLLLRGLTGSARRLPVPRAKIHSLGKLGGNIPALVENQKKYFGTYSVMAMLNAQTVLDHIQKVADIEGEQNENNENLWFHPVMSHLYNAKNGYDKQPEKTMFIIERLQSYFPFLKIMAENQREYSNGKYKQNRVEVNSNDIFEVLKRAFGVLKMYRDLTNHYKTYEEKLNDGCEFLTSTEQPLSGMINNYYTVALRNMNERYGYKTEDLAFIQDKRFKFVKDAYGKKKSQVNTGFFLSLQDYNGDTQKKLHLSGVGIALLICLFLDKQYINIFLSRLPIFSSYNAQSEERRIIIRSFGINSIKLPKDRIHSEKSNKSVAMDMLNEVKRCPDELFTTLSAEKQSRFRIISDDHNEVLMKRSSDRFVPLLLQYIDYGKLFDHIRFHVNMGKLRYLLKADKTCIDGQTRVRVIEQPLNGFGRLEEAETMRKQENGTFGNSGIRIRDFENMKRDDANPANYPYIVDTYTHYILENNKVEMFINDKEDSAPLLPVIEDDRYVVKTIPSCRMSTLEIPAMAFHMFLFGSKKTEKLIVDVHNRYKRLFQAMQKEEVTAENIASFGIAESDLPQKILDLISGNAHGKDVDAFIRLTVDDMLTDTERRIKRFKDDRKSIRSADNKMGKRGFKQISTGKLADFLAKDIVLFQPSVNDGENKITGLNYRIMQSAIAVYDSGDDYEAKQQFKLMFEKARLIGKGTTEPHPFLYKVFARSIPANAVEFYERYLIERKFYLTGLSNEIKKGNRVDVPFIRRDQNKWKTPAMKTLGRIYSEDLPVELPRQMFDNEIKSHLKSLPQMEGIDFNNANVTYLIAEYMKRVLDDDFQTFYQWNRNYRYMDMLKGEYDRKGSLQHCFTSVEEREGLWKERASRTERYRKQASNKIRSNRQMRNASSEEIETILDKRLSNSRNEYQKSEKVIRRYRVQDALLFLLAKKTLTELADFDGERFKLKEIMPDAEKGILSEIMPMSFTFEKGGKKYTITSEGMKLKNYGDFFVLASDKRIGNLLELVGSDIVSKEDIMEEFNKYDQCRPEISSIVFNLEKWAFDTYPELSARVDREEKVDFKSILKILLNNKNINKEQSDILRKIRNAFDHNNYPDKGVVEIKALPEIAMSIKKAFGEYAIMK

SEQ ID NO: 74 - protein, 1137 aa, Artificial Sequence
  Chemically Synthesized
MDYKDHDGDYKDHDIDYKDDDDKGGMYRMQLLSCIALSLALVTNSLGGNIPALVENQKKYFGTYSVMAMLNAQTVLDHIQKVADIEGEQNENNENLWFHPVMSHLYNAKNGYDKQPEKTMFIIERLQSYFPFLKIMAENQREYSNGKYKQNRVEVNSNDIFEVLKRAFGVLKMYRDLTNHYKTYEEKLNDGCEFLTSTEQPLSGMINNYYTVALRNMNERYGYKTEDLAFIQDKRFKFVKDAYGKKKSQVNTGFFLSLQDYNGDTQKKLHLSGVGIALLICLFLDKQYINIFLSRLPIFSSYNAQSEERRIIIRSFGINSIKLPKDRIHSEKSNKSVAMDMLNEVKRCPDELFTTLSAEKQSRFRIISDDHNEVLMKRSSDRFVPLLLQYIDYGKLFDHIRFHVNMGKLRYLLKADKTCIDGQTRVRVIEQPLNGFGRLEEAETMRKQENGTFGNSGIRIRDFENMKRDDANPANYPYIVDTYTHYILENNKVEMFINDKEDSAPLLPVIEDDRYVVKTIPSCRMSTLEIPAMAFHMFLFGSKKTEKLIVDVHNRYKRLFQAMQKEEVTAENIASFGIAESDLPQKILDLISGNAHGKDVDAFIRLTVDDMLTDTERRIKRFKDDRKSIRSADNKMGKRGFKQISTGKLADFLAKDIVLFQPSVNDGENKITGLNYRIMQSAIAVYDSGDDYEAKQQFKLMFEKARLIGKGTTEPHPFLYKVFARSIPANAVEFYERYLIERKFYLTGLSNEIKKGNRVDVPFIRRDQNKWKTPAMKTLGRIYSEDLPVELPRQMFDNEIKSHLKSLPQMEGIDFNNANVTYLIAEYMKRVLDDDFQTFYQWNRNYRYMDMLKGEYDRKGSLQHCFTSVEEREGLWKERASRTERYRKQASNKIRSNRQMRNASSEEIETILDKRLSNSRNEYQKSEKVIRRYRVQDALLFLLAKKTLTELADFDGERFKLKEIMPDAEKGILSEIMPMSFTFEKGGKKYTITSEGMKLKNYGDFFVLASDKRIGNLLELVGSDIVSKEDIMEEFNKYDQCRPEISSIVFNLEKWAFDTYPELSARVDREEKVDFKSILKILLNNKNINKEQSDILRKIRNAFDHNNYPDKGVVEIKALPEIAMSIKKAFGEYAIMK

SEQ ID NO: 75 - protein, 1159 aa, Artificial Sequence
  Chemically Synthesized
MDYKDHDGDYKDHDIDYKDDDDKGGMGCCFSKTAAKGEAAAERPGEAAVASSPSKANGQENGHVKVGSGGNIPALVENQKKYFGTYSVMAMLNAQTVLDHIQKVADIEGEQNENNENLWFHPVMSHLYNAKNGYDKQPEKTMFIIERLQSYFPFLKIMAENQREYSNGKYKQNRVEVNSNDIFEVLKRAFGVLKMYRDLTNHYKTYEEKLNDGCEFLTSTEQPLSGMINNYYTVALRNMNERYGYKTEDLAFIQDKRFKFVKDAYGKKKSQVNTGFFLSLQDYNGDTQKKLHLSGVGIALLICLFLDKQYINIFLSRLPIFSSYNAQSEERRIIIRSFGINSIKLPKDRIHSEKSNKSVAMDMLNEVKRCPDELFTTLSAEKQSRFRIISDDHNEVLMKRSSDRFVPLLLQYIDYGKLFDHIRFHVNMGKLRYLLKADKTCIDGQTRVRVIEQPLNGFGRLEEAETMRKQENGTFGNSGIRIRDFENMKRDDANPANYPYIVDTYTHYILENNKVEMFINDKEDSAPLLPVIEDDRYVVKTIPSCRMSTLEIPAMAFHMFLFGSKKTEKLIVDVHNRYKRLFQAMQKEEVTAENIASFGIAESDLPQKILDLISGNAHGKDVDAFIRLTVDDMLTDTERRIKRFKDDRKSIRSADNKMGKRGFKQISTGKLADFLAKDIVLFQPSVNDGENKITGLNYRIMQSAIAVYDSGDDYEAKQQFKLMFEKARLIGKGTTEPHPFLYKVFARSIPANAVEFYERYLIERKFYLTGLSNEIKKGNRVDVPFIRRDQNKWKTPAMKTLGRIYSEDLPVELPRQMFDNEIKSHLKSLPQMEGIDFNNANVTYLIAEYMKRVLDDDFQTFYQWNRNYRYMDMLKGEYDRKGSLQHCFTSVEEREGLWKERASRTERYRKQASNKIRSNRQMRNASSEEIETILDKRLSNSRNEYQKSEKVIRRYRVQDALLFLLAKKTLTELADFDGERFKLKEIMPDAEKGILSEIMPMSFTFEKGGKKYTITSEGMKLKNYGDFFVLASDKRIGNLLELVGSDIVSKEDIMEEFNKYDQCRPEISSIVFNLEKWAFDTYPELSARVDREEKVDFKSILKILLNNKNINKEQSDILRKIRNAFDHNNYPDKGVVEIKALPEIAMSIKKAFGEYAIMK

SEQ ID NO: 76 - protein, 1133 aa, Artificial Sequence
  Chemically Synthesized
MDYKDHDGDYKDHDIDYKDDDDKGGMLLPVPLLLGLLGAAADGGNIPALVENQKKYFGTYSVMAMLNAQTVLDHIQKVADIEGEQNENNENLWFHPVMSHLYNAKNGYDKQPEKTMFIIERLQSYFPFLKIMAENQREYSNGKYKQNRVEVNSNDIFEVLKRAFGVLKMYRDLTNHYKTYEEKLNDGCEFLTSTEQPLSGMINNYYTVALRNMNERYGYKTEDLAFIQDKRFKFVKDAYGKKKSQVNTGFFLSLQDYNGDTQKKLHLSGVGIALLICLFLDKQYINIFLSRLPIFSSYNAQSEERRIIIRSFGINSIKLPKDRIHSEKSNKSVAMDMLNEVKRCPDELFTTLSAEKQSRFRIISDDHNEVLMKRSSDRFVPLLLQYIDYGKLFDHIRFHVNMGKLRYLLKADKTCIDGQTRVRVIEQPLNGFGRLEEAETMRKQENGTFGNSGIRIRDFENMKRDDANPANYPYIVDTYTHYILENNKVEMFINDKEDSAPLLPVIEDDRYVVKTIPSCRMSTLEIPAMAFHMFLFGSKKTEKLIVDVHNRYKRLFQAMQKEEVTAENIASFGIAESDLPQKILDLISGNAHGKDVDAFIRLTVDDMLTDTERRIKRFKDDRKSIRSADNKMGKRGFKQISTGKLADFLAKDIVLFQPSVNDGENKITGLNYRIMQSAIAVYDSGDDYEAKQQFKLMFEKARLIGKGTTEPHPFLYKVFARSIPANAVEFYERYLIERKFYLTGLSNEIKKGNRVDVPFIRRDQNKWKTPAMKTLGRIYSEDLPVELPRQMFDNEIKSHLKSLPQMEGIDFNNANVTYLIAEYMKRVLDDDFQTFYQWNRNYRYMDMLKGEYDRKGSLQHCFTSVEEREGLWKERASRTERYRKQASNKIRSNRQMRNASSEEIETILDKRLSNSRNEYQKSEKVIRRYRVQDALLFLLAKKTLTELADFDGERFKLKEIMPDAEKGILSEIMPMSFTFEKGGKKYTITSEGMKLKNYGDFFVLASDKRIGNLLELVGSDIVSKEDIMEEFNKYDQCRPEISSIVFNLEKWAFDTYPELSARVDREEKVDFKSILKILLNNKNINKEQSDILRKIRNAFDHNNYPDKGVVEIKALPEIAMSIKKAFGEYAIMK

SEQ ID NO: 77 - protein, 1125 aa, Artificial Sequence
  Chemically Synthesized
MDYKDHDGDYKDHDIDYKDDDDKGGGITLGKDELGGNIPALVENQKKYFGTYSVMAMLNAQTVLDHIQKVADIEGEQNENNENLWFHPVMSHLYNAKNGYDKQPEKTMFIIERLQSYFPFLKIMAENQREYSNGKYKQNRVEVNSNDIFEVLKRAFGVLKMYRDLTNHYKTYEEKLNDGCEFLTSTEQPLSGMINNYYTVALRNMNERYGYKTEDLAFIQDKRFKFVKDAYGKKKSQVNTGFFLSLQDYNGDTQKKLHLSGVGIALLICLFLDKQYINIFLSRLPIFSSYNAQSEERRIIIRSFGINSIKLPKDRIHSEKSNKSVAMDMLNEVKRCPDELFTTLSAEKQSRFRIISDDHNEVLMKRSSDRFVPLLLQYIDYGKLFDHIRFHVNMGKLRYLLKADKTCIDGQTRVRVIEQPLNGFGRLEEAETMRKQENGTFGNSGIRIRDFENMKRDDANPANYPYIVDTYTHYILENNKVEMFINDKEDSAPLLPVIEDDRYVVKTIPSCRMSTLEIPAMAFHMFLFGSKKTEKLIVDVHNRYKRLFQAMQKEEVTAENIASFGIAESDLPQKILDLISGNAHGKDVDAFIRLTVDDMLTDTERRIKRFKDDRKSIRSADNKMGKRGFKQISTGKLADFLAKDIVLFQPSVNDGENKITGLNYRIMQSAIAVYDSGDDYEAKQQFKLMFEKARLIGKGTTEPHPFLYKVFARSIPANAVEFYERYLIERKFYLTGLSNEIKKGNRVDVPFIRRDQNKWKTPAMKTLGRIYSEDLPVELPRQMFDNEIKSHLKSLPQMEGIDFNNANVTYLIAEYMKRVLDDDFQTFYQWNRNYRYMDMLKGEYDRKGSLQHCFTSVEEREGLWKERASRTERYRKQASNKIRSNRQMRNASSEEIETILDKRLSNSRNEYQKSEKVIRRYRVQDALLFLLAKKTLTELADFDGERFKLKEIMPDAEKGILSEIMPMSFTFEKGGKKYTITSEGMKLKNYGDFFVLASDKRIGNLLELVGSDIVSKEDIMEEFNKYDQCRPEISSIVFNLEKWAFDTYPELSARVDREEKVDFKSILKILLNNKNINKEQSDILRKIRNAFDHNNYPDKGVVEIKALPEIAMSIKKAFGEYAIMK

SEQ ID NO: 78 - protein, 1119 aa, Artificial Sequence
  Chemically Synthesized
MDYKDHDGDYKDHDIDYKDDDDKGGSKLGGNIPALVENQKKYFGTYSVMAMLNAQTVLDHIQKVADIEGEQNENNENLWFHPVMSHLYNAKNGYDKQPEKTMFIIERLQSYFPFLKIMAENQREYSNGKYKQNRVEVNSNDIFEVLKRAFGVLKMYRDLTNHYKTYEEKLNDGCEFLTSTEQPLSGMINNYYTVALRNMNERYGYKTEDLAFIQDKRFKFVKDAYGKKKSQVNTGFFLSLQDYNGDTQKKLHLSGVGIALLICLFLDKQYINIFLSRLPIFSSYNAQSEERRIIIRSFGINSIKLPKDRIHSEKSNKSVAMDMLNEVKRCPDELFTTLSAEKQSRFRIISDDHNEVLMKRSSDRFVPLLLQYIDYGKLFDHIRFHVNMGKLRYLLKADKTCIDGQTRVRVIEQPLNGFGRLEEAETMRKQENGTFGNSGIRIRDFENMKRDDANPANYPYIVDTYTHYILENNKVEMFINDKEDSAPLLPVIEDDRYVVKTIPSCRMSTLEIPAMAFHMFLFGSKKTEKLIVDVHNRYKRLFQAMQKEEVTAENIASFGIAESDLPQKILDLISGNAHGKDVDAFIRLTVDDMLTDTERRIKRFKDDRKSIRSADNKMGKRGFKQISTGKLADFLAKDIVLFQPSVNDGENKITGLNYRIMQSAIAVYDSGDDYEAKQQFKLMFEKARLIGKGTTEPHPFLYKVFARSIPANAVEFYERYLIERKFYLTGLSNEIKKGNRVDVPFIRRDQNKWKTPAMKTLGRIYSEDLPVELPRQMFDNEIKSHLKSLPQMEGIDFNNANVTYLIAEYMKRVLDDDFQTFYQWNRNYRYMDMLKGEYDRKGSLQHCFTSVEEREGLWKERASRTERYRKQASNKIRSNRQMRNASSEEIETILDKRLSNSRNEYQKSEKVIRRYRVQDALLFLLAKKTLTELADFDGERFKLKEIMPDAEKGILSEIMPMSFTFEKGGKKYTITSEGMKLKNYGDFFVLASDKRIGNLLELVGSDIVSKEDIMEEFNKYDQCRPEISSIVFNLEKWAFDTYPELSARVDREEKVDFKSILKILLNNKNINKEQSDILRKIRNAFDHNNYPDKGVVEIKALPEIAMSIKKAFGEYAIMK

SEQ ID NO: 79 - protein, 1048 aa, Artificial Sequence
  Chemically Synthesized
MDYKDHDGDYKDHDIDYKDDDDKGGNSKKRSLEDNETEIKVSRDTWNTKNMRSLEPPRSKKRIHGGNIPALVENQKKYFGTYSVMAMLNAQTVLDHIQKVADIEGEQNENNENLWFHPVMSHLYNAKNGYDKQPEKTMFIIERLQSYFPFLKIMAENQREYSNGKYKQNRVEVNSNDIFEVLKRAFGVLKMYRDLTNHYKTYEEKLNDGCEFLTSTEQPLSGMINNYYTVALRNMNERYGYKTEDLAFIQDKRFKFVKDAYGKKKSQVNTGFFLSLQDYNGDTQKKLHLSGVGIALLICLFLDKQYINIFLSRLPIFSSYNAQSEERRIIIRSFGINSIKLPKDRIHSEKSNKSVAMDMLNEVKRCPDELFTTLSAEKQSRFRIISDDHNEVLMKRSSDRFVPLLLQYIDYGKLFDHIRFHVNMGKLRYLLKADKTCIDGQTRVRVIEQPLNGFGRLEEAETMRKQENGTFGNSGIRIRDFENMKRDDANPANYPYIVDTYTHYILENNKVEMFINDKEDSAPLLPVIEDDRYVVKTIPSCRMSTLEIPAMAFHMFLFGSKKTEKLIVDVHNRYKRLFQAMQKEEVTAENIASFGIAESDLPQKILDLISGNAHGKDVDAFIRLTVDDMLTDTERRIKRFKDDRKSIRSADNKMGKRGFKQISTGKLADFLAKDIVLFQPSVNDGENKITGLNYRIMQSAIAVYDSGDDYEAKQQFKLMFEKARLIGKGTTEPHPFLYKVFARSIPANAVEFYERYLIERKFYLTGLSNEIKKGNRVDVPFIRRDQNKWKTPAMKTLGRIYSEDLPVELPRQMFDNEIKSHLKSLPQMEGIDFNNANVTYLIAEYMKRVLDDDFQTFYQWNRNYRYMDMLKGEYDRKGSLQHCFTSVEEREGLWKERASRTERYRKQASNKIRSNRQMRNASSEEIETILDKRLSNSRNEYQKSEKVIRRYRVQDALLFLLAKKTLTELADFDGERFKLKEIMPDAEKGILSEIMPMSFTFEKGGKKYTITSEGMKLKNYGDFFVLASDKRIGNLLELVGSDIVSKED

SEQ ID NO: 80 - protein, 1048 aa, Artificial Sequence
  Chemically Synthesized
MDYKDHDGDYKDHDIDYKDDDDKGGKSKKRSLEDNETEIEVSRDTWNNKNMRSLEPPRSKKRINGGNIPALVENQKKYFGTYSVMAMLNAQTVLDHIQKVADIEGEQNENNENLWFHPVMSHLYNAKNGYDKQPEKTMFIIERLQSYFPFLKIMAENQREYSNGKYKQNRVEVNSNDIFEVLKRAFGVLKMYRDLTNHYKTYEEKLNDGCEFLTSTEQPLSGMINNYYTVALRNMNERYGYKTEDLAFIQDKRFKFVKDAYGKKKSQVNTGFFLSLQDYNGDTQKKLHLSGVGIALLICLFLDKQYINIFLSRLPIFSSYNAQSEERRIIIRSFGINSIKLPKDRIHSEKSNKSVAMDMLNEVKRCPDELFTTLSAEKQSRFRIISDDHNEVLMKRSSDRFVPLLLQYIDYGKLFDHIRFHVNMGKLRYLLKADKTCIDGQTRVRVIEQPLNGFGRLEEAETMRKQENGTFGNSGIRIRDFENMKRDDANPANYPYIVDTYTHYILENNKVEMFINDKEDSAPLLPVIEDDRYVVKTIPSCRMSTLEIPAMAFHMFLFGSKKTEKLIVDVHNRYKRLFQAMQKEEVTAENIASFGIAESDLPQKILDLISGNAHGKDVDAFIRLTVDDMLTDTERRIKRFKDDRKSIRSADNKMGKRGFKQISTGKLADFLAKDIVLFQPSVNDGENKITGLNYRIMQSAIAVYDSGDDYEAKQQFKLMFEKARLIGKGTTEPHPFLYKVFARSIPANAVEFYERYLIERKFYLTGLSNEIKKGNRVDVPFIRRDQNKWKTPAMKTLGRIYSEDLPVELPRQMFDNEIKSHLKSLPQMEGIDFNNANVTYLIAEYMKRVLDDDFQTFYQWNRNYRYMDMLKGEYDRKGSLQHCFTSVEEREGLWKERASRTERYRKQASNKIRSNRQMRNASSEEIETILDKRLSNSRNEYQKSEKVIRRYRVQDALLFLLAKKTLTELADFDGERFKLKEIMPDAEKGILSEIMPMSFTFEKGGKKYTITSEGMKLKNYGDFFVLASDKRIGNLLELVGSDIVSKED

SEQ ID NO: 81 - protein, 1020 aa, Artificial Sequence
  Chemically Synthesized
MDYKDHDGDYKDHDIDYKDDDDKGGLQLPPLERLTLGGNIPALVENQKKYFGTYSVMAMLNAQTVLDHIQKVADIEGEQNENNENLWFHPVMSHLYNAKNGYDKQPEKTMFIIERLQSYFPFLKIMAENQREYSNGKYKQNRVEVNSNDIFEVLKRAFGVLKMYRDLTNHYKTYEEKLNDGCEFLTSTEQPLSGMINNYYTVALRNMNERYGYKTEDLAFIQDKRFKFVKDAYGKKKSQVNTGFFLSLQDYNGDTQKKLHLSGVGIALLICLFLDKQYINIFLSRLPIFSSYNAQSEERRIIIRSFGINSIKLPKDRIHSEKSNKSVAMDMLNEVKRCPDELFTTLSAEKQSRFRIISDDHNEVLMKRSSDRFVPLLLQYIDYGKLFDHIRFHVNMGKLRYLLKADKTCIDGQTRVRVIEQPLNGFGRLEEAETMRKQENGTFGNSGIRIRDFENMKRDDANPANYPYIVDTYTHYILENNKVEMFINDKEDSAPLLPVIEDDRYVVKTIPSCRMSTLEIPAMAFHMFLFGSKKTEKLIVDVHNRYKRLFQAMQKEEVTAENIASFGIAESDLPQKILDLISGNAHGKDVDAFIRLTVDDMLTDTERRIKRFKDDRKSIRSADNKMGKRGFKQISTGKLADFLAKDIVLFQPSVNDGENKITGLNYRIMQSAIAVYDSGDDYEAKQQFKLMFEKARLIGKGTTEPHPFLYKVFARSIPANAVEFYERYLIERKFYLTGLSNEIKKGNRVDVPFIRRDQNKWKTPAMKTLGRIYSEDLPVELPRQMFDNEIKSHLKSLPQMEGIDFNNANVTYLIAEYMKRVLDDDFQTFYQWNRNYRYMDMLKGEYDRKGSLQHCFTSVEEREGLWKERASRTERYRKQASNKIRSNRQMRNASSEEIETILDKRLSNSRNEYQKSEKVIRRYRVQDALLFLLAKKTLTELADFDGERFKLKEIMPDAEKGILSEIMPMSFTFEKGGKKYTITSEGMKLKNYGDFFVLASDKRIGNLLELVGSDIVSKED

SEQ ID NO: 82 - protein, 1025 aa, Artificial Sequence
  Chemically Synthesized
MDYKDHDGDYKDHDIDYKDDDDKGGGSLQLPPLERLTLGSSGGNIPALVENQKKYFGTYSVMAMLNAQTVLDHIQKVADIEGEQNENNENLWFHPVMSHLYNAKNGYDKQPEKTMFIIERLQSYFPFLKIMAENQREYSNGKYKQNRVEVNSNDIFEVLKRAFGVLKMYRDLTNHYKTYEEKLNDGCEFLTSTEQPLSGMINNYYTVALRNMNERYGYKTEDLAFIQDKRFKFVKDAYGKKKSQVNTGFFLSLQDYNGDTQKKLHLSGVGIALLICLFLDKQYINIFLSRLPIFSSYNAQSEERRIIIRSFGINSIKLPKDRIHSEKSNKSVAMDMLNEVKRCPDELFTTLSAEKQSRFRIISDDHNEVLMKRSSDRFVPLLLQYIDYGKLFDHIRFHVNMGKLRYLLKADKTCIDGQTRVRVIEQPLNGFGRLEEAETMRKQENGTFGNSGIRIRDFENMKRDDANPANYPYIVDTYTHYILENNKVEMFINDKEDSAPLLPVIEDDRYVVKTIPSCRMSTLEIPAMAFHMFLFGSKKTEKLIVDVHNRYKRLFQAMQKEEVTAENIASFGIAESDLPQKILDLISGNAHGKDVDAFIRLTVDDMLTDTERRIKRFKDDRKSIRSADNKMGKRGFKQISTGKLADFLAKDIVLFQPSVNDGENKITGLNYRIMQSAIAVYDSGDDYEAKQQFKLMFEKARLIGKGTTEPHPFLYKVFARSIPANAVEFYERYLIERKFYLTGLSNEIKKGNRVDVPFIRRDQNKWKTPAMKTLGRIYSEDLPVELPRQMFDNEIKSHLKSLPQMEGIDFNNANVTYLIAEYMKRVLDDDFQTFYQWNRNYRYMDMLKGEYDRKGSLQHCFTSVEEREGLWKERASRTERYRKQASNKIRSNRQMRNASSEEIETILDKRLSNSRNEYQKSEKVIRRYRVQDALLFLLAKKTLTELADFDGERFKLKEIMPDAEKGILSEIMPMSFTFEKGGKKYTITSEGMKLKNYGDFFVLASDKRIGNLLELVGSDIVSKED

SEQ ID NO: 83 - protein, 1041 aa, Artificial Sequence
  Chemically Synthesized
MDYKDHDGDYKDHDIDYKDDDDKGGMSVLTPLLLRGLTGSARRLPVPRAKIHSLGDPGGNIPALVENQKKYFGTYSVMAMLNAQTVLDHIQKVADIEGEQNENNENLWFHPVMSHLYNAKNGYDKQPEKTMFIIERLQSYFPFLKIMAENQREYSNGKYKQNRVEVNSNDIFEVLKRAFGVLKMYRDLTNHYKTYEEKLNDGCEFLTSTEQPLSGMINNYYTVALRNMNERYGYKTEDLAFIQDKRFKFVKDAYGKKKSQVNTGFFLSLQDYNGDTQKKLHLSGVGIALLICLFLDKQYINIFLSRLPIFSSYNAQSEERRIIIRSFGINSIKLPKDRIHSEKSNKSVAMDMLNEVKRCPDELFTTLSAEKQSRFRIISDDHNEVLMKRSSDRFVPLLLQYIDYGKLFDHIRFHVNMGKLRYLLKADKTCIDGQTRVRVIEQPLNGFGRLEEAETMRKQENGTFGNSGIRIRDFENMKRDDANPANYPYIVDTYTHYILENNKVEMFINDKEDSAPLLPVIEDDRYVVKTIPSCRMSTLEIPAMAFHMFLFGSKKTEKLIVDVHNRYKRLFQAMQKEEVTAENIASFGIAESDLPQKILDLISGNAHGKDVDAFIRLTVDDMLTDTERRIKRFKDDRKSIRSADNKMGKRGFKQISTGKLADFLAKDIVLFQPSVNDGENKITGLNYRIMQSAIAVYDSGDDYEAKQQFKLMFEKARLIGKGTTEPHPFLYKVFARSIPANAVEFYERYLIERKFYLTGLSNEIKKGNRVDVPFIRRDQNKWKTPAMKTLGRIYSEDLPVELPRQMFDNEIKSHLKSLPQMEGIDFNNANVTYLIAEYMKRVLDDDFQTFYQWNRNYRYMDMLKGEYDRKGSLQHCFTSVEEREGLWKERASRTERYRKQASNKIRSNRQMRNASSEEIETILDKRLSNSRNEYQKSEKVIRRYRVQDALLFLLAKKTLTELADFDGERFKLKEIMPDAEKGILSEIMPMSFTFEKGGKKYTITSEGMKLKNYGDFFVLASDKRIGNLLELVGSDIVSKED

SEQ ID NO: 84 - protein, 1139 aa, Artificial Sequence
  Chemically Synthesized
MDYKDHDGDYKDHDIDYKDDDDKGGMSVLTPLLLRGLTGSARRLPVPRAKIHSLGDPMSVLTPLLLRGLTGSARRLPVPRAKIHSLGKLATMSVLTPLLLRGLTGSARRLPVPRAKIHSLGDPMSVLTPLLLRGLTGSARRLPVPRAKIHSLGKLGGNIPALVENQKKYFGTYSVMAMLNAQTVLDHIQKVADIEGEQNENNENLWFHPVMSHLYNAKNGYDKQPEKTMFIIERLQSYFPFLKIMAENQREYSNGKYKQNRVEVNSNDIFEVLKRAFGVLKMYRDLTNHYKTYEEKLNDGCEFLTSTEQPLSGMINNYYTVALRNMNERYGYKTEDLAFIQDKRFKFVKDAYGKKKSQVNTGFFLSLQDYNGDTQKKLHLSGVGIALLICLFLDKQYINIFLSRLPIFSSYNAQSEERRIIIRSFGINSIKLPKDRIHSEKSNKSVAMDMLNEVKRCPDELFTTLSAEKQSRFRIISDDHNEVLMKRSSDRFVPLLLQYIDYGKLFDHIRFHVNMGKLRYLLKADKTCIDGQTRVRVIEQPLNGFGRLEEAETMRKQENGTFGNSGIRIRDFENMKRDDANPANYPYIVDTYTHYILENNKVEMFINDKEDSAPLLPVIEDDRYVVKTIPSCRMSTLEIPAMAFHMFLFGSKKTEKLIVDVHNRYKRLFQAMQKEEVTAENIASFGIAESDLPQKILDLISGNAHGKDVDAFIRLTVDDMLTDTERRIKRFKDDRKSIRSADNKMGKRGFKQISTGKLADFLAKDIVLFQPSVNDGENKITGLNYRIMQSAIAVYDSGDDYEAKQQFKLMFEKARLIGKGTTEPHPFLYKVFARSIPANAVEFYERYLIERKFYLTGLSNEIKKGNRVDVPFIRRDQNKWKTPAMKTLGRIYSEDLPVELPRQMFDNEIKSHLKSLPQMEGIDFNNANVTYLIAEYMKRVLDDDFQTFYQWNRNYRYMDMLKGEYDRKGSLQHCFTSVEEREGLWKERASRTERYRKQASNKIRSNRQMRNASSEEIETILDKRLSNSRNEYQKSEKVIRRYRVQDALLFLLAKKTLTELADFDGERFKLKEIMPDAEKGILSEIMPMSFTFEKGGKKYTITSEGMKLKNYGDFFVLASDKRIGNLLELVGSDIVSKED

SEQ ID NO: 85 - protein, 1030 aa, Artificial Sequence
  Chemically Synthesized
MDYKDHDGDYKDHDIDYKDDDDKGGMYRMQLLSCIALSLALVTNSLGGNIPALVENQKKYFGTYSVMAMLNAQTVLDHIQKVADIEGEQNENNENLWFHPVMSHLYNAKNGYDKQPEKTMFIIERLQSYFPFLKIMAENQREYSNGKYKQNRVEVNSNDIFEVLKRAFGVLKMYRDLTNHYKTYEEKLNDGCEFLTSTEQPLSGMINNYYTVALRNMNERYGYKTEDLAFIQDKRFKFVKDAYGKKKSQVNTGFFLSLQDYNGDTQKKLHLSGVGIALLICLFLDKQYINIFLSRLPIFSSYNAQSEERRIIIRSFGINSIKLPKDRIHSEKSNKSVAMDMLNEVKRCPDELFTTLSAEKQSRFRIISDDHNEVLMKRSSDRFVPLLLQYIDYGKLFDHIRFHVNMGKLRYLLKADKTCIDGQTRVRVIEQPLNGFGRLEEAETMRKQENGTFGNSGIRIRDFENMKRDDANPANYPYIVDTYTHYILENNKVEMFINDKEDSAPLLPVIEDDRYVVKTIPSCRMSTLEIPAMAFHMFLFGSKKTEKLIVDVHNRYKRLFQAMQKEEVTAENIASFGIAESDLPQKILDLISGNAHGKDVDAFIRLTVDDMLTDTERRIKRFKDDRKSIRSADNKMGKRGFKQISTGKLADFLAKDIVLFQPSVNDGENKITGLNYRIMQSAIAVYDSGDDYEAKQQFKLMFEKARLIGKGTTEPHPFLYKVFARSIPANAVEFYERYLIERKFYLTGLSNEIKKGNRVDVPFIRRDQNKWKTPAMKTLGRIYSEDLPVELPRQMFDNEIKSHLKSLPQMEGIDFNNANVTYLIAEYMKRVLDDDFQTFYQWNRNYRYMDMLKGEYDRKGSLQHCFTSVEEREGLWKERASRTERYRKQASNKIRSNRQMRNASSEEIETILDKRLSNSRNEYQKSEKVIRRYRVQDALLFLLAKKTLTELADFDGERFKLKEIMPDAEKGILSEIMPMSFTFEKGGKKYTITSEGMKLKNYGDFFVLASDKRIGNLLELVGSDIVSKED

SEQ ID NO: 86 - protein, 1052 aa, Artificial Sequence
  Chemically Synthesized
MDYKDHDGDYKDHDIDYKDDDDKGGMGCCFSKTAAKGEAAAERPGEAAVASSPSKANGQENGHVKVGSGGNIPALVENQKKYFGTYSVMAMLNAQTVLDHIQKVADIEGEQNENNENLWFHPVMSHLYNAKNGYDKQPEKTMFIIERLQSYFPFLKIMAENQREYSNGKYKQNRVEVNSNDIFEVLKRAFGVLKMYRDLTNHYKTYEEKLNDGCEFLTSTEQPLSGMINNYYTVALRNMNERYGYKTEDLAFIQDKRFKFVKDAYGKKKSQVNTGFFLSLQDYNGDTQKKLHLSGVGIALLICLFLDKQYINIFLSRLPIFSSYNAQSEERRIIIRSFGINSIKLPKDRIHSEKSNKSVAMDMLNEVKRCPDELFTTLSAEKQSRFRIISDDHNEVLMKRSSDRFVPLLLQYIDYGKLFDHIRFHVNMGKLRYLLKADKTCIDGQTRVRVIEQPLNGFGRLEEAETMRKQENGTFGNSGIRIRDFENMKRDDANPANYPYIVDTYTHYILENNKVEMFINDKEDSAPLLPVIEDDRYVVKTIPSCRMSTLEIPAMAFHMFLFGSKKTEKLIVDVHNRYKRLFQAMQKEEVTAENIASFGIAESDLPQKILDLISGNAHGKDVDAFIRLTVDDMLTDTERRIKRFKDDRKSIRSADNKMGKRGFKQISTGKLADFLAKDIVLFQPSVNDGENKITGLNYRIMQSAIAVYDSGDDYEAKQQFKLMFEKARLIGKGTTEPHPFLYKVFARSIPANAVEFYERYLIERKFYLTGLSNEIKKGNRVDVPFIRRDQNKWKTPAMKTLGRIYSEDLPVELPRQMFDNEIKSHLKSLPQMEGIDFNNANVTYLIAEYMKRVLDDDFQTFYQWNRNYRYMDMLKGEYDRKGSLQHCFTSVEEREGLWKERASRTERYRKQASNKIRSNRQMRNASSEEIETILDKRLSNSRNEYQKSEKVIRRYRVQDALLFLLAKKTLTELADFDGERFKLKEIMPDAEKGILSEIMPMSFTFEKGGKKYTITSEGMKLKNYGDFFVLASDKRIGNLLELVGSDIVSKED

SEQ ID NO: 87 - protein, 1026 aa, Artificial Sequence
  Chemically Synthesized
MDYKDHDGDYKDHDIDYKDDDDKGGMLLPVPLLLGLLGAAADGGNIPALVENQKKYFGTYSVMAMLNAQTVLDHIQKVADIEGEQNENNENLWFHPVMSHLYNAKNGYDKQPEKTMFIIERLQSYFPFLKIMAENQREYSNGKYKQNRVEVNSNDIFEVLKRAFGVLKMYRDLTNHYKTYEEKLNDGCEFLTSTEQPLSGMINNYYTVALRNMNERYGYKTEDLAFIQDKRFKFVKDAYGKKKSQVNTGFFLSLQDYNGDTQKKLHLSGVGIALLICLFLDKQYINIFLSRLPIFSSYNAQSEERRIIIRSFGINSIKLPKDRIHSEKSNKSVAMDMLNEVKRCPDELFTTLSAEKQSRFRIISDDHNEVLMKRSSDRFVPLLLQYIDYGKLFDHIRFHVNMGKLRYLLKADKTCIDGQTRVRVIEQPLNGFGRLEEAETMRKQENGTFGNSGIRIRDFENMKRDDANPANYPYIVDTYTHYILENNKVEMFINDKEDSAPLLPVIEDDRYVVKTIPSCRMSTLEIPAMAFHMFLFGSKKTEKLIVDVHNRYKRLFQAMQKEEVTAENIASFGIAESDLPQKILDLISGNAHGKDVDAFIRLTVDDMLTDTERRIKRFKDDRKSIRSADNKMGKRGFKQISTGKLADFLAKDIVLFQPSVNDGENKITGLNYRIMQSAIAVYDSGDDYEAKQQFKLMFEKARLIGKGTTEPHPFLYKVFARSIPANAVEFYERYLIERKFYLTGLSNEIKKGNRVDVPFIRRDQNKWKTPAMKTLGRIYSEDLPVELPRQMFDNEIKSHLKSLPQMEGIDFNNANVTYLIAEYMKRVLDDDFQTFYQWNRNYRYMDMLKGEYDRKGSLQHCFTSVEEREGLWKERASRTERYRKQASNKIRSNRQMRNASSEEIETILDKRLSNSRNEYQKSEKVIRRYRVQDALLFLLAKKTLTELADFDGERFKLKEIMPDAEKGILSEIMPMSFTFEKGGKKYTITSEGMKLKNYGDFFVLASDKRIGNLLELVGSDIVSKED

SEQ ID NO: 88 - protein, 1018 aa, Artificial Sequence
  Chemically Synthesized
MDYKDHDGDYKDHDIDYKDDDDKGGGITLGKDELGGNIPALVENQKKYFGTYSVMAMLNAQTVLDHIQKVADIEGEQNENNENLWFHPVMSHLYNAKNGYDKQPEKTMFIIERLQSYFPFLKIMAENQREYSNGKYKQNRVEVNSNDIFEVLKRAFGVLKMYRDLTNHYKTYEEKLNDGCEFLTSTEQPLSGMINNYYTVALRNMNERYGYKTEDLAFIQDKRFKFVKDAYGKKKSQVNTGFFLSLQDYNGDTQKKLHLSGVGIALLICLFLDKQYINIFLSRLPIFSSYNAQSEERRIIIRSFGINSIKLPKDRIHSEKSNKSVAMDMLNEVKRCPDELFTTLSAEKQSRFRIISDDHNEVLMKRSSDRFVPLLLQYIDYGKLFDHIRFHVNMGKLRYLLKADKTCIDGQTRVRVIEQPLNGFGRLEEAETMRKQENGTFGNSGIRIRDFENMKRDDANPANYPYIVDTYTHYILENNKVEMFINDKEDSAPLLPVIEDDRYVVKTIPSCRMSTLEIPAMAFHMFLFGSKKTEKLIVDVHNRYKRLFQAMQKEEVTAENIASFGIAESDLPQKILDLISGNAHGKDVDAFIRLTVDDMLTDTERRIKRFKDDRKSIRSADNKMGKRGFKQISTGKLADFLAKDIVLFQPSVNDGENKITGLNYRIMQSAIAVYDSGDDYEAKQQFKLMFEKARLIGKGTTEPHPFLYKVFARSIPANAVEFYERYLIERKFYLTGLSNEIKKGNRVDVPFIRRDQNKWKTPAMKTLGRIYSEDLPVELPRQMFDNEIKSHLKSLPQMEGIDFNNANVTYLIAEYMKRVLDDDFQTFYQWNRNYRYMDMLKGEYDRKGSLQHCFTSVEEREGLWKERASRTERYRKQASNKIRSNRQMRNASSEEIETILDKRLSNSRNEYQKSEKVIRRYRVQDALLFLLAKKTLTELADFDGERFKLKEIMPDAEKGILSEIMPMSFTFEKGGKKYTITSEGMKLKNYGDFFVLASDKRIGNLLELVGSDIVSKED

SEQ ID NO: 89 - protein, 1012 aa, Artificial Sequence
  Chemically Synthesized
MDYKDHDGDYKDHDIDYKDDDDKGGSKLGGNIPALVENQKKYFGTYSVMAMLNAQTVLDHIQKVADIEGEQNENNENLWFHPVMSHLYNAKNGYDKQPEKTMFIIERLQSYFPFLKIMAENQREYSNGKYKQNRVEVNSNDIFEVLKRAFGVLKMYRDLTNHYKTYEEKLNDGCEFLTSTEQPLSGMINNYYTVALRNMNERYGYKTEDLAFIQDKRFKFVKDAYGKKKSQVNTGFFLSLQDYNGDTQKKLHLSGVGIALLICLFLDKQYINIFLSRLPIFSSYNAQSEERRIIIRSFGINSIKLPKDRIHSEKSNKSVAMDMLNEVKRCPDELFTTLSAEKQSRFRIISDDHNEVLMKRSSDRFVPLLLQYIDYGKLFDHIRFHVNMGKLRYLLKADKTCIDGQTRVRVIEQPLNGFGRLEEAETMRKQENGTFGNSGIRIRDFENMKRDDANPANYPYIVDTYTHYILENNKVEMFINDKEDSAPLLPVIEDDRYVVKTIPSCRMSTLEIPAMAFHMFLFGSKKTEKLIVDVHNRYKRLFQAMQKEEVTAENIASFGIAESDLPQKILDLISGNAHGKDVDAFIRLTVDDMLTDTERRIKRFKDDRKSIRSADNKMGKRGFKQISTGKLADFLAKDIVLFQPSVNDGENKITGLNYRIMQSAIAVYDSGDDYEAKQQFKLMFEKARLIGKGTTEPHPFLYKVFARSIPANAVEFYERYLIERKFYLTGLSNEIKKGNRVDVPFIRRDQNKWKTPAMKTLGRIYSEDLPVELPRQMFDNEIKSHLKSLPQMEGIDFNNANVTYLIAEYMKRVLDDDFQTFYQWNRNYRYMDMLKGEYDRKGSLQHCFTSVEEREGLWKERASRTERYRKQASNKIRSNRQMRNASSEEIETILDKRLSNSRNEYQKSEKVIRRYRVQDALLFLLAKKTLTELADFDGERFKLKEIMPDAEKGILSEIMPMSFTFEKGGKKYTITSEGMKLKNYGDFFVLASDKRIGNLLELVGSDIVSKED

SEQ ID NO: 90 - protein, 1034 aa, Artificial Sequence
  Chemically Synthesized
MDYKDHDGDYKDHDIDYKDDDDKGGNSKKRSLEDNETEIKVSRDTWNTKNMRSLEPPRSKKRIHGGIEKKKSFAKGMGVKSTLVSGSKVYMTTFAEGSDARLEKIVEGDSIRSVNEGEAFSAEMADKNAGYKIGNAKFSHPKGYAVVANNPLYTGPVQQDMLGLKETLEKRYFGESADGNDNICIQVIHNILDIEKILAEYITNAAYAVNNISGLDKDIIGFGKFSTVYTYDEFKDPEHHRAAFNNNDKLINAIKAQYDEFDNFLDNPRLGYFGQAFFSKEGRNYIINYGNECYDILALLSGLRHWVVHNNEEESRISRTWLYNLDKNLDNEYISTLNYLYDRITNELTNSFSKNSAANVNYIAETLGINPAEFAEQYFRFSIMKEQKNLGFNITKLREVMLDRKDMSEIRKNHKVFDSIRTKVYTMMDFVIYRYYIEEDAKVAAANKSLPDNEKSLSEKDIFVINLRGSFNDDQKDALYYDEANRIWRKLENIMHNIKEFRGNKTREYKKKDAPRLPRILPAGRDVSAFSKLMYALTMFLDGKEINDLLTTLINKFDNIQSFLKVMPLIGVNAKFVEEYAFFKDSAKIADELRLIKSFARMGEPIADARRAMYIDAIRILGTNLSYDELKALADTFSLDENGNKLKKGKHGMRNFIINNVISNKRFHYLIRYGDPAHLHEIAKNEAVVKFVLGRIADIQKKQGQNGKNQIDRYYETCIGKDKGKSVSEKVDALTKIITGMNYDQFDKKRSVIEDTGRENAEREKFKKIISLYLTVIYHILKNIVNINARYVIGFHCVERDAQLYKEKGYDINLKKLEEKGFSSVTKLCAGIDETAPDKRKDVEKEMAERAKESIDSLESANPKLYANYIKYSDEKKAEEFTRQINREKAKTALNAYLRNTKWNVIIREDLLRIDNKTCTLFRNKAVHLEVARYVHAYINDIAEVNSYFQLYHYIMQRIIMNERYEKSSGKVSEYFDAVNDEKKYNDRLLKLLCVPFGYCIPRFKNLSIEALFDRNEAAKFDKEKKKVSGNSGS

SEQ ID NO: 91 - protein, 1034 aa, Artificial Sequence
  Chemically Synthesized
MDYKDHDGDYKDHDIDYKDDDDKGGKSKKRSLEDNETEIEVSRDTWNNKNMRSLEPPRSKKRINGGIEKKKSFAKGMGVKSTLVSGSKVYMTTFAEGSDARLEKIVEGDSIRSVNEGEAFSAEMADKNAGYKIGNAKFSHPKGYAVVANNPLYTGPVQQDMLGLKETLEKRYFGESADGNDNICIQVIHNILDIEKILAEYITNAAYAVNNISGLDKDIIGFGKFSTVYTYDEFKDPEHHRAAFNNNDKLINAIKAQYDEFDNFLDNPRLGYFGQAFFSKEGRNYIINYGNECYDILALLSGLRHWVVHNNEEESRISRTWLYNLDKNLDNEYISTLNYLYDRITNELTNSFSKNSAANVNYIAETLGINPAEFAEQYFRFSIMKEQKNLGFNITKLREVMLDRKDMSEIRKNHKVFDSIRTKVYTMMDFVIYRYYIEEDAKVAAANKSLPDNEKSLSEKDIFVINLRGSFNDDQKDALYYDEANRIWRKLENIMHNIKEFRGNKTREYKKKDAPRLPRILPAGRDVSAFSKLMYALTMFLDGKEINDLLTTLINKFDNIQSFLKVMPLIGVNAKFVEEYAFFKDSAKIADELRLIKSFARMGEPIADARRAMYIDAIRILGTNLSYDELKALADTFSLDENGNKLKKGKHGMRNFIINNVISNKRFHYLIRYGDPAHLHEIAKNEAVVKFVLGRIADIQKKQGQNGKNQIDRYYETCIGKDKGKSVSEKVDALTKIITGMNYDQFDKKRSVIEDTGRENAEREKFKKIISLYLTVIYHILKNIVNINARYVIGFHCVERDAQLYKEKGYDINLKKLEEKGFSSVTKLCAGIDETAPDKRKDVEKEMAERAKESIDSLESANPKLYANYIKYSDEKKAEEFTRQINREKAKTALNAYLRNTKWNVIIREDLLRIDNKTCTLFRNKAVHLEVARYVHAYINDIAEVNSYFQLYHYIMQRIIMNERYEKSSGKVSEYFDAVNDEKKYNDRLLKLLCVPFGYCIPRFKNLSIEALFDRNEAAKFDKEKKKVSGNSGS

SEQ ID NO: 92 - protein, 1006 aa, Artificial Sequence
  Chemically Synthesized
MDYKDHDGDYKDHDIDYKDDDDKGGLQLPPLERLTLGGIEKKKSFAKGMGVKSTLVSGSKVYMTTFAEGSDARLEKIVEGDSIRSVNEGEAFSAEMADKNAGYKIGNAKFSHPKGYAVVANNPLYTGPVQQDMLGLKETLEKRYFGESADGNDNICIQVIHNILDIEKILAEYITNAAYAVNNISGLDKDIIGFGKFSTVYTYDEFKDPEHHRAAFNNNDKLINAIKAQYDEFDNFLDNPRLGYFGQAFFSKEGRNYIINYGNECYDILALLSGLRHWVVHNNEEESRISRTWLYNLDKNLDNEYISTLNYLYDRITNELTNSFSKNSAANVNYIAETLGINPAEFAEQYFRFSIMKEQKNLGFNITKLREVMLDRKDMSEIRKNHKVFDSIRTKVYTMMDFVIYRYYIEEDAKVAAANKSLPDNEKSLSEKDIFVINLRGSFNDDQKDALYYDEANRIWRKLENIMHNIKEFRGNKTREYKKKDAPRLPRILPAGRDVSAFSKLMYALTMFLDGKEINDLLTTLINKFDNIQSFLKVMPLIGVNAKFVEEYAFFKDSAKIADELRLIKSFARMGEPIADARRAMYIDAIRILGTNLSYDELKALADTFSLDENGNKLKKGKHGMRNFIINNVISNKRFHYLIRYGDPAHLHEIAKNEAVVKFVLGRIADIQKKQGQNGKNQIDRYYETCIGKDKGKSVSEKVDALTKIITGMNYDQFDKKRSVIEDTGRENAEREKFKKIISLYLTVIYHILKNIVNINARYVIGFHCVERDAQLYKEKGYDINLKKLEEKGFSSVTKLCAGIDETAPDKRKDVEKEMAERAKESIDSLESANPKLYANYIKYSDEKKAEEFTRQINREKAKTALNAYLRNTKWNVIIREDLLRIDNKTCTLFRNKAVHLEVARYVHAYINDIAEVNSYFQLYHYIMQRIIMNERYEKSSGKVSEYFDAVNDEKKYNDRLLKLLCVPFGYCIPRFKNLSIEALFDRNEAAKFDKEKKKVSGNSGS

SEQ ID NO: 93 - protein, 1011 aa, Artificial Sequence
  Chemically Synthesized
MDYKDHDGDYKDHDIDYKDDDDKGGGSLQLPPLERLTLGSSGGIEKKKSFAKGMGVKSTLVSGSKVYMTTFAEGSDARLEKIVEGDSIRSVNEGEAFSAEMADKNAGYKIGNAKFSHPKGYAVVANNPLYTGPVQQDMLGLKETLEKRYFGESADGNDNICIQVIHNILDIEKILAEYITNAAYAVNNISGLDKDIIGFGKFSTVYTYDEFKDPEHHRAAFNNNDKLINAIKAQYDEFDNFLDNPRLGYFGQAFFSKEGRNYIINYGNECYDILALLSGLRHWVVHNNEEESRISRTWLYNLDKNLDNEYISTLNYLYDRITNELTNSFSKNSAANVNYIAETLGINPAEFAEQYFRFSIMKEQKNLGFNITKLREVMLDRKDMSEIRKNHKVFDSIRTKVYTMMDFVIYRYYIEEDAKVAAANKSLPDNEKSLSEKDIFVINLRGSFNDDQKDALYYDEANRIWRKLENIMHNIKEFRGNKTREYKKKDAPRLPRILPAGRDVSAFSKLMYALTMFLDGKEINDLLTTLINKFDNIQSFLKVMPLIGVNAKFVEEYAFFKDSAKIADELRLIKSFARMGEPIADARRAMYIDAIRILGTNLSYDELKALADTFSLDENGNKLKKGKHGMRNFIINNVISNKRFHYLIRYGDPAHLHEIAKNEAVVKFVLGRIADIQKKQGQNGKNQIDRYYETCIGKDKGKSVSEKVDALTKIITGMNYDQFDKKRSVIEDTGRENAEREKFKKIISLYLTVIYHILKNIVNINARYVIGFHCVERDAQLYKEKGYDINLKKLEEKGFSSVTKLCAGIDETAPDKRKDVEKEMAERAKESIDSLESANPKLYANYIKYSDEKKAEEFTRQINREKAKTALNAYLRNTKWNVIIREDLLRIDNKTCTLFRNKAVHLEVARYVHAYINDIAEVNSYFQLYHYIMQRIIMNERYEKSSGKVSEYFDAVNDEKKYNDRLLKLLCVPFGYCIPRFKNLSIEALFDRNEAAKFDKEKKKVSGNSGS

SEQ ID NO: 94 - protein, 1027 aa, Artificial Sequence
  Chemically Synthesized
MDYKDHDGDYKDHDIDYKDDDDKGGMSVLTPLLLRGLTGSARRLPVPRAKIHSLGDPGGIEKKKSFAKGMGVKSTLVSGSKVYMTTFAEGSDARLEKIVEGDSIRSVNEGEAFSAEMADKNAGYKIGNAKFSHPKGYAVVANNPLYTGPVQQDMLGLKETLEKRYFGESADGNDNICIQVIHNILDIEKILAEYITNAAYAVNNISGLDKDIIGFGKFSTVYTYDEFKDPEHHRAAFNNNDKLINAIKAQYDEFDNFLDNPRLGYFGQAFFSKEGRNYIINYGNECYDILALLSGLRHWVVHNNEEESRISRTWLYNLDKNLDNEYISTLNYLYDRITNELTNSFSKNSAANVNYIAETLGINPAEFAEQYFRFSIMKEQKNLGFNITKLREVMLDRKDMSEIRKNHKVFDSIRTKVYTMMDFVIYRYYIEEDAKVAAANKSLPDNEKSLSEKDIFVINLRGSFNDDQKDALYYDEANRIWRKLENIMHNIKEFRGNKTREYKKKDAPRLPRILPAGRDVSAFSKLMYALTMFLDGKEINDLLTTLINKFDNIQSFLKVMPLIGVNAKFVEEYAFFKDSAKIADELRLIKSFARMGEPIADARRAMYIDAIRILGTNLSYDELKALADTFSLDENGNKLKKGKHGMRNFIINNVISNKRFHYLIRYGDPAHLHEIAKNEAVVKFVLGRIADIQKKQGQNGKNQIDRYYETCIGKDKGKSVSEKVDALTKIITGMNYDQFDKKRSVIEDTGRENAEREKFKKIISLYLTVIYHILKNIVNINARYVIGFHCVERDAQLYKEKGYDINLKKLEEKGFSSVTKLCAGIDETAPDKRKDVEKEMAERAKESIDSLESANPKLYANYIKYSDEKKAEEFTRQINREKAKTALNAYLRNTKWNVIIREDLLRIDNKTCTLFRNKAVHLEVARYVHAYINDIAEVNSYFQLYHYIMQRIIMNERYEKSSGKVSEYFDAVNDEKKYNDRLLKLLCVPFGYCIPRFKNLSIEALFDRNEAAKFDKEKKKVSGNSGS

SEQ ID NO: 95 - protein, 1125 aa, Artificial Sequence
  Chemically Synthesized
MDYKDHDGDYKDHDIDYKDDDDKGGMSVLTPLLLRGLTGSARRLPVPRAKIHSLGDPMSVLTPLLLRGLTGSARRLPVPRAKIHSLGKLATMSVLTPLLLRGLTGSARRLPVPRAKIHSLGDPMSVLTPLLLRGLTGSARRLPVPRAKIHSLGKLGGIEKKKSFAKGMGVKSTLVSGSKVYMTTFAEGSDARLEKIVEGDSIRSVNEGEAFSAEMADKNAGYKIGNAKFSHPKGYAVVANNPLYTGPVQQDMLGLKETLEKRYFGESADGNDNICIQVIHNILDIEKILAEYITNAAYAVNNISGLDKDIIGFGKFSTVYTYDEFKDPEHHRAAFNNNDKLINAIKAQYDEFDNFLDNPRLGYFGQAFFSKEGRNYIINYGNECYDILALLSGLRHWVVHNNEEESRISRTWLYNLDKNLDNEYISTLNYLYDRITNELTNSFSKNSAANVNYIAETLGINPAEFAEQYFRFSIMKEQKNLGFNITKLREVMLDRKDMSEIRKNHKVFDSIRTKVYTMMDFVIYRYYIEEDAKVAAANKSLPDNEKSLSEKDIFVINLRGSFNDDQKDALYYDEANRIWRKLENIMHNIKEFRGNKTREYKKKDAPRLPRILPAGRDVSAFSKLMYALTMFLDGKEINDLLTTLINKFDNIQSFLKVMPLIGVNAKFVEEYAFFKDSAKIADELRLIKSFARMGEPIADARRAMYIDAIRILGTNLSYDELKALADTFSLDENGNKLKKGKHGMRNFIINNVISNKRFHYLIRYGDPAHLHEIAKNEAVVKFVLGRIADIQKKQGQNGKNQIDRYYETCIGKDKGKSVSEKVDALTKIITGMNYDQFDKKRSVIEDTGRENAEREKFKKIISLYLTVIYHILKNIVNINARYVIGFHCVERDAQLYKEKGYDINLKKLEEKGFSSVTKLCAGIDETAPDKRKDVEKEMAERAKESIDSLESANPKLYANYIKYSDEKKAEEFTRQINREKAKTALNAYLRNTKWNVIIREDLLRIDNKTCTLFRNKAVHLEVARYVHAYINDIAEVNSYFQLYHYIMQRIIMNERYEKSSGKVSEYFDAVNDEKKYNDRLLKLLCVPFGYCIPRFKNLSIEALFDRNEAAKFDKEKKKVSGNSGS

SEQ ID NO: 96 - protein, 1015 aa, Artificial Sequence
  Chemically Synthesized
MDYKDHDGDYKDHDIDYKDDDDKGGMYRMQLLSCIALSLALVTNSGGIEKKKSFAKGMGVKSTLVSGSKVYMTTFAEGSDARLEKIVEGDSIRSVNEGEAFSAEMADKNAGYKIGNAKFSHPKGYAVVANNPLYTGPVQQDMLGLKETLEKRYFGESADGNDNICIQVIHNILDIEKILAEYITNAAYAVNNISGLDKDIIGFGKFSTVYTYDEFKDPEHHRAAFNNNDKLINAIKAQYDEFDNFLDNPRLGYFGQAFFSKEGRNYIINYGNECYDILALLSGLRHWVVHNNEEESRISRTWLYNLDKNLDNEYISTLNYLYDRITNELTNSFSKNSAANVNYIAETLGINPAEFAEQYFRFSIMKEQKNLGFNITKLREVMLDRKDMSEIRKNHKVFDSIRTKVYTMMDFVIYRYYIEEDAKVAAANKSLPDNEKSLSEKDIFVINLRGSFNDDQKDALYYDEANRIWRKLENIMHNIKEFRGNKTREYKKKDAPRLPRILPAGRDVSAFSKLMYALTMFLDGKEINDLLTTLINKFDNIQSFLKVMPLIGVNAKFVEEYAFFKDSAKIADELRLIKSFARMGEPIADARRAMYIDAIRILGTNLSYDELKALADTFSLDENGNKLKKGKHGMRNFIINNVISNKRFHYLIRYGDPAHLHEIAKNEAVVKFVLGRIADIQKKQGQNGKNQIDRYYETCIGKDKGKSVSEKVDALTKIITGMNYDQFDKKRSVIEDTGRENAEREKFKKIISLYLTVIYHILKNIVNINARYVIGFHCVERDAQLYKEKGYDINLKKLEEKGFSSVTKLCAGIDETAPDKRKDVEKEMAERAKESIDSLESANPKLYANYIKYSDEKKAEEFTRQINREKAKTALNAYLRNTKWNVIIREDLLRIDNKTCTLFRNKAVHLEVARYVHAYINDIAEVNSYFQLYHYIMQRIIMNERYEKSSGKVSEYFDAVNDEKKYNDRLLKLLCVPFGYCIPRFKNLSIEALFDRNEAAKFDKEKKKVSGNSGS

SEQ ID NO: 97 - protein, 1038 aa, Artificial Sequence
  Chemically Synthesized
MDYKDHDGDYKDHDIDYKDDDDKGGMGCCFSKTAAKGEAAAERPGEAAVASSPSKANGQENGHVKVGSGGIEKKKSFAKGMGVKSTLVSGSKVYMTTFAEGSDARLEKIVEGDSIRSVNEGEAFSAEMADKNAGYKIGNAKFSHPKGYAVVANNPLYTGPVQQDMLGLKETLEKRYFGESADGNDNICIQVIHNILDIEKILAEYITNAAYAVNNISGLDKDIIGFGKFSTVYTYDEFKDPEHHRAAFNNNDKLINAIKAQYDEFDNFLDNPRLGYFGQAFFSKEGRNYIINYGNECYDILALLSGLRHWVVHNNEEESRISRTWLYNLDKNLDNEYISTLNYLYDRITNELTNSFSKNSAANVNYIAETLGINPAEFAEQYFRFSIMKEQKNLGFNITKLREVMLDRKDMSEIRKNHKVFDSIRTKVYTMMDFVIYRYYIEEDAKVAAANKSLPDNEKSLSEKDIFVINLRGSFNDDQKDALYYDEANRIWRKLENIMHNIKEFRGNKTREYKKKDAPRLPRILPAGRDVSAFSKLMYALTMFLDGKEINDLLTTLINKFDNIQSFLKVMPLIGVNAKFVEEYAFFKDSAKIADELRLIKSFARMGEPIADARRAMYIDAIRILGTNLSYDELKALADTFSLDENGNKLKKGKHGMRNFIINNVISNKRFHYLIRYGDPAHLHEIAKNEAVVKFVLGRIADIQKKQGQNGKNQIDRYYETCIGKDKGKSVSEKVDALTKIITGMNYDQFDKKRSVIEDTGRENAEREKFKKIISLYLTVIYHILKNIVNINARYVIGFHCVERDAQLYKEKGYDINLKKLEEKGFSSVTKLCAGIDETAPDKRKDVEKEMAERAKESIDSLESANPKLYANYIKYSDEKKAEEFTRQINREKAKTALNAYLRNTKWNVIIREDLLRIDNKTCTLFRNKAVHLEVARYVHAYINDIAEVNSYFQLYHYIMQRIIMNERYEKSSGKVSEYFDAVNDEKKYNDRLLKLLCVPFGYCIPRFKNLSIEALFDRNEAAKFDKEKKKVSGNSGS

SEQ ID NO: 98 - protein, 1012 aa, Artificial Sequence
  Chemically Synthesized
MDYKDHDGDYKDHDIDYKDDDDKGGMLLPVPLLLGLLGAAADGGIEKKKSFAKGMGVKSTLVSGSKVYMTTFAEGSDARLEKIVEGDSIRSVNEGEAFSAEMADKNAGYKIGNAKFSHPKGYAVVANNPLYTGPVQQDMLGLKETLEKRYFGESADGNDNICIQVIHNILDIEKILAEYITNAAYAVNNISGLDKDIIGFGKFSTVYTYDEFKDPEHHRAAFNNNDKLINAIKAQYDEFDNFLDNPRLGYFGQAFFSKEGRNYIINYGNECYDILALLSGLRHWVVHNNEEESRISRTWLYNLDKNLDNEYISTLNYLYDRITNELTNSFSKNSAANVNYIAETLGINPAEFAEQYFRFSIMKEQKNLGFNITKLREVMLDRKDMSEIRKNHKVFDSIRTKVYTMMDFVIYRYYIEEDAKVAAANKSLPDNEKSLSEKDIFVINLRGSFNDDQKDALYYDEANRIWRKLENIMHNIKEFRGNKTREYKKKDAPRLPRILPAGRDVSAFSKLMYALTMFLDGKEINDLLTTLINKFDNIQSFLKVMPLIGVNAKFVEEYAFFKDSAKIADELRLIKSFARMGEPIADARRAMYIDAIRILGTNLSYDELKALADTFSLDENGNKLKKGKHGMRNFIINNVISNKRFHYLIRYGDPAHLHEIAKNEAVVKFVLGRIADIQKKQGQNGKNQIDRYYETCIGKDKGKSVSEKVDALTKIITGMNYDQFDKKRSVIEDTGRENAEREKFKKIISLYLTVIYHILKNIVNINARYVIGFHCVERDAQLYKEKGYDINLKKLEEKGFSSVTKLCAGIDETAPDKRKDVEKEMAERAKESIDSLESANPKLYANYIKYSDEKKAEEFTRQINREKAKTALNAYLRNTKWNVIIREDLLRIDNKTCTLFRNKAVHLEVARYVHAYINDIAEVNSYFQLYHYIMQRIIMNERYEKSSGKVSEYFDAVNDEKKYNDRLLKLLCVPFGYCIPRFKNLSIEALFDRNEAAKFDKEKKKVSGNSGS

SEQ ID NO: 99 - protein, 1004 aa, Artificial Sequence
  Chemically Synthesized
MDYKDHDGDYKDHDIDYKDDDDKGGGITLGKDELGGIEKKKSFAKGMGVKSTLVSGSKVYMTTFAEGSDARLEKIVEGDSIRSVNEGEAFSAEMADKNAGYKIGNAKFSHPKGYAVVANNPLYTGPVQQDMLGLKETLEKRYFGESADGNDNICIQVIHNILDIEKILAEYITNAAYAVNNISGLDKDIIGFGKFSTVYTYDEFKDPEHHRAAFNNNDKLINAIKAQYDEFDNFLDNPRLGYFGQAFFSKEGRNYIINYGNECYDILALLSGLRHWVVHNNEEESRISRTWLYNLDKNLDNEYISTLNYLYDRITNELTNSFSKNSAANVNYIAETLGINPAEFAEQYFRFSIMKEQKNLGFNITKLREVMLDRKDMSEIRKNHKVFDSIRTKVYTMMDFVIYRYYIEEDAKVAAANKSLPDNEKSLSEKDIFVINLRGSFNDDQKDALYYDEANRIWRKLENIMHNIKEFRGNKTREYKKKDAPRLPRILPAGRDVSAFSKLMYALTMFLDGKEINDLLTTLINKFDNIQSFLKVMPLIGVNAKFVEEYAFFKDSAKIADELRLIKSFARMGEPIADARRAMYIDAIRILGTNLSYDELKALADTFSLDENGNKLKKGKHGMRNFIINNVISNKRFHYLIRYGDPAHLHEIAKNEAVVKFVLGRIADIQKKQGQNGKNQIDRYYETCIGKDKGKSVSEKVDALTKIITGMNYDQFDKKRSVIEDTGRENAEREKFKKIISLYLTVIYHILKNIVNINARYVIGFHCVERDAQLYKEKGYDINLKKLEEKGFSSVTKLCAGIDETAPDKRKDVEKEMAERAKESIDSLESANPKLYANYIKYSDEKKAEEFTRQINREKAKTALNAYLRNTKWNVIIREDLLRIDNKTCTLFRNKAVHLEVARYVHAYINDIAEVNSYFQLYHYIMQRIIMNERYEKSSGKVSEYFDAVNDEKKYNDRLLKLLCVPFGYCIPRFKNLSIEALFDRNEAAKFDKEKKKVSGNSGS

SEQ ID NO: 100 - protein, 998 aa, Artificial Sequence
  Chemically Synthesized
MDYKDHDGDYKDHDIDYKDDDDKGGSKLGGIEKKKSFAKGMGVKSTLVSGSKVYMTTFAEGSDARLEKIVEGDSIRSVNEGEAFSAEMADKNAGYKIGNAKFSHPKGYAVVANNPLYTGPVQQDMLGLKETLEKRYFGESADGNDNICIQVIHNILDIEKILAEYITNAAYAVNNISGLDKDIIGFGKFSTVYTYDEFKDPEHHRAAFNNNDKLINAIKAQYDEFDNFLDNPRLGYFGQAFFSKEGRNYIINYGNECYDILALLSGLRHWVVHNNEEESRISRTWLYNLDKNLDNEYISTLNYLYDRITNELTNSFSKNSAANVNYIAETLGINPAEFAEQYFRFSIMKEQKNLGFNITKLREVMLDRKDMSEIRKNHKVFDSIRTKVYTMMDFVIYRYYIEEDAKVAAANKSLPDNEKSLSEKDIFVINLRGSFNDDQKDALYYDEANRIWRKLENIMHNIKEFRGNKTREYKKKDAPRLPRILPAGRDVSAFSKLMYALTMFLDGKEINDLLTTLINKFDNIQSFLKVMPLIGVNAKFVEEYAFFKDSAKIADELRLIKSFARMGEPIADARRAMYIDAIRILGTNLSYDELKALADTFSLDENGNKLKKGKHGMRNFIINNVISNKRFHYLIRYGDPAHLHEIAKNEAVVKFVLGRIADIQKKQGQNGKNQIDRYYETCIGKDKGKSVSEKVDALTKIITGMNYDQFDKKRSVIEDTGRENAEREKFKKIISLYLTVIYHILKNIVNINARYVIGFHCVERDAQLYKEKGYDINLKKLEEKGFSSVTKLCAGIDETAPDKRKDVEKEMAERAKESIDSLESANPKLYANYIKYSDEKKAEEFTRQINREKAKTALNAYLRNTKWNVIIREDLLRIDNKTCTLFRNKAVHLEVARYVHAYINDIAEVNSYFQLYHYIMQRIIMNERYEKSSGKVSEYFDAVNDEKKYNDRLLKLLCVPFGYCIPRFKNLSIEALFDRNEAAKFDKEKKKVSGNSGS

SEQ ID NO: 101 - protein, 1273 aa, Artificial Sequence
  Chemically Synthesized
MFVFLVLLPLVSSQCVNLTTRTQLPPAYTNSFTRGVYYPDKVFRSSVLHSTQDLFLPFFSNVTWFHAIHVSGTNGTKRFDNPVLPFNDGVYFASTEKSNIIRGWIFGTTLDSKTQSLLIVNNATNVVIKVCEFQFCNDPFLGVYYHKNNKSWMESEFRVYSSANNCTFEYVSQPFLMDLEGKQGNFKNLREFVFKNIDGYFKIYSKHTPINLVRDLPQGFSALEPLVDLPIGINITRFQTLLALHRSYLTPGDSSSGWTAGAAAYYVGYLQPRTFLLKYNENGTITDAVDCALDPLSETKCTLKSFTVEKGIYQTSNFRVQPTESIVRFPNITNLCPFGEVFNATRFASVYAWNRKRISNCVADYSVLYNSASFSTFKCYGVSPTKLNDLCFTNVYADSFVIRGDEVRQIAPGQTGKIADYNYKLPDDFTGCVIAWNSNNLDSKVGGNYNYLYRLFRKSNLKPFERDISTEIYQAGSTPCNGVEGFNCYFPLQSYGFQPTNGVGYQPYRVVVLSFELLHAPATVCGPKKSTNLVKNKCVNFNFNGLTGTGVLTESNKKFLPFQQFGRDIADTTDAVRDPQTLEILDITPCSFGGVSVITPGTNTSNQVAVLYQDVNCTEVPVAIHADQLTPTWRVYSTGSNVFQTRAGCLIGAEHVNNSYECDIPIGAGICASYQTQTNSPRRARSVASQSIIAYTMSLGAENSVAYSNNSIAIPTNFTISVTTEILPVSMTKTSVDCTMYICGDSTECSNLLLQYGSFCTQLNRALTGIAVEQDKNTQEVFAQVKQIYKTPPIKDFGGFNFSQILPDPSKPSKRSFIEDLLFNKVTLADAGFIKQYGDCLGDIAARDLICAQKFNGLTVLPPLLTDEMIAQYTSALLAGTITSGWTFGAGAALQIPFAMQMAYRFNGIGVTQNVLYENQKLIANQFNSAIGKIQDSLSSTASALGKLQDVVNQNAQALNTLVKQLSSNFGAISSVLNDILSRLDKVEAEVQIDRLITGRLQSLQTYVTQQLIRAAEIRASANLAATKMSECVLGQSKRVDFCGKGYHLMSFPQSAPHGVVFLHVTYVPAQEKNFTTAPAICHDGKAHFPREGVFVSNGTHWFVTQRNFYEPQIITTDNTFVSGNCDVVIGIVNNTVYDPLQPELDSFKEELDKYFKNHTSPDVDLGDISGINASVVNIQKEIDRLNEVAKNLNESLIDLQELGKYEQYIKWPWYIWLGFIAGLIAIVMVTIMLCCMTSCCSCLKGCCSCGSCCKFDEDDSEPVLKGVKLHYT

SEQ ID NO: 102 - protein, 1246 aa, Artificial Sequence
  Chemically Synthesized
MFVFLVLLPLVSSQCVNLTTRTQLPPAYTNSFTRGVYYPDKVFRSSVLHSTQDLFLPFFSNVTWFHAIHVSGTNGTKRFDNPVLPFNDGVYFASTEKSNIIRGWIFGTTLDSKTQSLLIVNNATNVVIKVCEFQFCNDPFLGVYYHKNNKSWMESEFRVYSSANNCTFEYVSQPFLMDLEGKQGNFKNLREFVFKNIDGYFKIYSKHTPINLVRDLPQGFSALEPLVDLPIGINITRFQTLLALHRSYLTPGDSSSGWTAGAAAYYVGYLQPRTFLLKYNENGTITDAVDCALDPLSETKCTLKSFTVEKGIYQTSNFRVQPTESIVRFPNITNLCPFGEVFNATRFASVYAWNRKRISNCVADYSVLYNSASFSTFKCYGVSPTKLNDLCFTNVYADSFVIRGDEVRQIAPGQTGKIADYNYKLPDDFTGCVIAWNSNNLDSKVGGNYNYLYRLFRKSNLKPFERDISTEIYQAGSTPCNGVEGFNCYFPLQSYGFQPTNGVGYQPYRVVVLSFELLHAPATVCGPKKSTNLVKNKCVNFNFNGLTGTGVLTESNKKFLPFQQFGRDIADTTDAVRDPQTLEILDITPCSFGGVSVITPGTNTSNQVAVLYQDVNCTEVPVAIHADQLTPTWRVYSTGSNVFQTRAGCLIGAEHVNNSYECDIPIGAGICASYQTQTNSPRRARSVASQSIIAYTMSLGAENSVAYSNNSIAIPTNFTISVTTEILPVSMTKTSVDCTMYICGDSTECSNLLLQYGSFCTQLNRALTGIAVEQDKNTQEVFAQVKQIYKTPPIKDFGGFNFSQILPDPSKPSKRSFIEDLLFNKVTLADAGFIKQYGDCLGDIAARDLICAQKFNGLTVLPPLLTDEMIAQYTSALLAGTITSGWTFGAGAALQIPFAMQMAYRFNGIGVTQNVLYENQKLIANQFNSAIGKIQDSLSSTASALGKLQDVVNQNAQALNTLVKQLSSNFGAISSVLNDILSRLDKVEAEVQIDRLITGRLQSLQTYVTQQLIRAAEIRASANLAATKMSECVLGQSKRVDFCGKGYHLMSFPQSAPHGVVFLHVTYVPAQEKNFTTAPAICHDGKAHFPREGVFVSNGTHWFVTQRNFYEPQIITTDNTFVSGNCDVVIGIVNNTVYDPLQPELDSFKEELDKYFKNHTSPDVDLGDISGINASVVNIQKEIDRLNEVAKNLNESLIDLQELGKYEQYIKWPWYIWLGFIAGLIAIVMVTIMLCCMTSCCSCLKG

SEQ ID NO: 103 - protein, 1254 aa, Artificial Sequence
  Chemically Synthesized
MFVFLVLLPLVSSQCVNLTTRTQLPPAYTNSFTRGVYYPDKVFRSSVLHSTQDLFLPFFSNVTWFHAIHVSGTNGTKRFDNPVLPFNDGVYFASTEKSNIIRGWIFGTTLDSKTQSLLIVNNATNVVIKVCEFQFCNDPFLGVYYHKNNKSWMESEFRVYSSANNCTFEYVSQPFLMDLEGKQGNFKNLREFVFKNIDGYFKIYSKHTPINLVRDLPQGFSALEPLVDLPIGINITRFQTLLALHRSYLTPGDSSSGWTAGAAAYYVGYLQPRTFLLKYNENGTITDAVDCALDPLSETKCTLKSFTVEKGIYQTSNFRVQPTESIVRFPNITNLCPFGEVFNATRFASVYAWNRKRISNCVADYSVLYNSASFSTFKCYGVSPTKLNDLCFTNVYADSFVIRGDEVRQIAPGQTGKIADYNYKLPDDFTGCVIAWNSNNLDSKVGGNYNYLYRLFRKSNLKPFERDISTEIYQAGSTPCNGVEGFNCYFPLQSYGFQPTNGVGYQPYRVVVLSFELLHAPATVCGPKKSTNLVKNKCVNFNFNGLTGTGVLTESNKKFLPFQQFGRDIADTTDAVRDPQTLEILDITPCSFGGVSVITPGTNTSNQVAVLYQDVNCTEVPVAIHADQLTPTWRVYSTGSNVFQTRAGCLIGAEHVNNSYECDIPIGAGICASYQTQTNSPRRARSVASQSIIAYTMSLGAENSVAYSNNSIAIPTNFTISVTTEILPVSMTKTSVDCTMYICGDSTECSNLLLQYGSFCTQLNRALTGIAVEQDKNTQEVFAQVKQIYKTPPIKDFGGFNFSQILPDPSKPSKRSFIEDLLFNKVTLADAGFIKQYGDCLGDIAARDLICAQKFNGLTVLPPLLTDEMIAQYTSALLAGTITSGWTFGAGAALQIPFAMQMAYRFNGIGVTQNVLYENQKLIANQFNSAIGKIQDSLSSTASALGKLQDVVNQNAQALNTLVKQLSSNFGAISSVLNDILSRLDKVEAEVQIDRLITGRLQSLQTYVTQQLIRAAEIRASANLAATKMSECVLGQSKRVDFCGKGYHLMSFPQSAPHGVVFLHVTYVPAQEKNFTTAPAICHDGKAHFPREGVFVSNGTHWFVTQRNFYEPQIITTDNTFVSGNCDVVIGIVNNTVYDPLQPELDSFKEELDKYFKNHTSPDVDLGDISGINASVVNIQKEIDRLNEVAKNLNESLIDLQELGKYEQYIKWPWYIWLGFIAGLIAIVMVTIMLCCMTSCCSCLKGNRVRQGYS

SEQ ID NO: 104 - protein, 1255 aa, Artificial Sequence
  Chemically Synthesized
MFVFLVLLPLVSSQCVNLTTRTQLPPAYTNSFTRGVYYPDKVFRSSVLHSTQDLFLPFFSNVTWFHAIHVSGTNGTKRFDNPVLPFNDGVYFASTEKSNIIRGWIFGTTLDSKTQSLLIVNNATNVVIKVCEFQFCNDPFLGVYYHKNNKSWMESEFRVYSSANNCTFEYVSQPFLMDLEGKQGNFKNLREFVFKNIDGYFKIYSKHTPINLVRDLPQGFSALEPLVDLPIGINITRFQTLLALHRSYLTPGDSSSGWTAGAAAYYVGYLQPRTFLLKYNENGTITDAVDCALDPLSETKCTLKSFTVEKGIYQTSNFRVQPTESIVRFPNITNLCPFGEVFNATRFASVYAWNRKRISNCVADYSVLYNSASFSTFKCYGVSPTKLNDLCFTNVYADSFVIRGDEVRQIAPGQTGKIADYNYKLPDDFTGCVIAWNSNNLDSKVGGNYNYLYRLFRKSNLKPFERDISTEIYQAGSTPCNGVEGFNCYFPLQSYGFQPTNGVGYQPYRVVVLSFELLHAPATVCGPKKSTNLVKNKCVNFNFNGLTGTGVLTESNKKFLPFQQFGRDIADTTDAVRDPQTLEILDITPCSFGGVSVITPGTNTSNQVAVLYQDVNCTEVPVAIHADQLTPTWRVYSTGSNVFQTRAGCLIGAEHVNNSYECDIPIGAGICASYQTQTNSPRRARSVASQSIIAYTMSLGAENSVAYSNNSIAIPTNFTISVTTEILPVSMTKTSVDCTMYICGDSTECSNLLLQYGSFCTQLNRALTGIAVEQDKNTQEVFAQVKQIYKTPPIKDFGGFNFSQILPDPSKPSKRSFIEDLLFNKVTLADAGFIKQYGDCLGDIAARDLICAQKFNGLTVLPPLLTDEMIAQYTSALLAGTITSGWTFGAGAALQIPFAMQMAYRFNGIGVTQNVLYENQKLIANQFNSAIGKIQDSLSSTASALGKLQDVVNQNAQALNTLVKQLSSNFGAISSVLNDILSRLDKVEAEVQIDRLITGRLQSLQTYVTQQLIRAAEIRASANLAATKMSECVLGQSKRVDFCGKGYHLMSFPQSAPHGVVFLHVTYVPAQEKNFTTAPAICHDGKAHFPREGVFVSNGTHWFVTQRNFYEPQIITTDNTFVSGNCDVVIGIVNNTVYDPLQPELDSFKEELDKYFKNHTSPDVDLGDISGINASVVNIQKEIDRLNEVAKNLNESLIDLQELGKYEQYIKWPWYIWLGFIAGLIAIVMVTIMLKLKHTKKRQIYTDIEMNRLGK

SEQ ID NO: 105 - protein, 1385 aa, Artificial Sequence
  Chemically Synthesized
MFVFLVLLPLVSSQCVNLTTRTQLPPAYTNSFTRGVYYPDKVFRSSVLHSTQDLFLPFFSNVTWFHAIHVSGTNGTKRFDNPVLPFNDGVYFASTEKSNIIRGWIFGTTLDSKTQSLLIVNNATNVVIKVCEFQFCNDPFLGVYYHKNNKSWMESEFRVYSSANNCTFEYVSQPFLMDLEGKQGNFKNLREFVFKNIDGYFKIYSKHTPINLVRDLPQGFSALEPLVDLPIGINITRFQTLLALHRSYLTPGDSSSGWTAGAAAYYVGYLQPRTFLLKYNENGTITDAVDCALDPLSETKCTLKSFTVEKGIYQTSNFRVQPTESIVRFPNITNLCPFGEVFNATRFASVYAWNRKRISNCVADYSVLYNSASFSTFKCYGVSPTKLNDLCFTNVYADSFVIRGDEVRQIAPGQTGKIADYNYKLPDDFTGCVIAWNSNNLDSKVGGNYNYLYRLFRKSNLKPFERDISTEIYQAGSTPCNGVEGFNCYFPLQSYGFQPTNGVGYQPYRVVVLSFELLHAPATVCGPKKSTNLVKNKCVNFNFNGLTGTGVLTESNKKFLPFQQFGRDIADTTDAVRDPQTLEILDITPCSFGGVSVITPGTNTSNQVAVLYQDVNCTEVPVAIHADQLTPTWRVYSTGSNVFQTRAGCLIGAEHVNNSYECDIPIGAGICASYQTQTNSPRRARSVASQSIIAYTMSLGAENSVAYSNNSIAIPTNFTISVTTEILPVSMTKTSVDCTMYICGDSTECSNLLLQYGSFCTQLNRALTGIAVEQDKNTQEVFAQVKQIYKTPPIKDFGGFNFSQILPDPSKPSKRSFIEDLLFNKVTLADAGFIKQYGDCLGDIAARDLICAQKFNGLTVLPPLLTDEMIAQYTSALLAGTITSGWTFGAGAALQIPFAMQMAYRFNGIGVTQNVLYENQKLIANQFNSAIGKIQDSLSSTASALGKLQDVVNQNAQALNTLVKQLSSNFGAISSVLNDILSRLDKVEAEVQIDRLITGRLQSLQTYVTQQLIRAAEIRASANLAATKMSECVLGQSKRVDFCGKGYHLMSFPQSAPHGVVFLHVTYVPAQEKNFTTAPAICHDGKAHFPREGVFVSNGTHWFVTQRNFYEPQIITTDNTFVSGNCDVVIGIVNNTVYDPLQPELDSFKEELDKYFKNHTSPDVDLGDISGINASVVNIQKEIDRLNEVAKNLNESLIDLQELGKYEQYIKWPWYIWLGFIAGLIAIVMVTIMLNRVRQGYSPLSFQTLTPVPRGPDRPEGTEEGGGEQDRNRSIRLVSGFLALAWDDLRSLCLFSYHRLRDLILIATRIVELLGHRGWEAIKYLWNLLLYWGRELKISAINLIDTIAIVVAGWTDRVIEIGQGIGRAILHIPRRIRQGLERSLL

SEQ ID NO: 106 - protein, 1392 aa, Artificial Sequence
  Chemically Synthesized
MFVFLVLLPLVSSQCVNLTTRTQLPPAYTNSFTRGVYYPDKVFRSSVLHSTQDLFLPFFSNVTWFHAIHVSGTNGTKRFDNPVLPFNDGVYFASTEKSNIIRGWIFGTTLDSKTQSLLIVNNATNVVIKVCEFQFCNDPFLGVYYHKNNKSWMESEFRVYSSANNCTFEYVSQPFLMDLEGKQGNFKNLREFVFKNIDGYFKIYSKHTPINLVRDLPQGFSALEPLVDLPIGINITRFQTLLALHRSYLTPGDSSSGWTAGAAAYYVGYLQPRTFLLKYNENGTITDAVDCALDPLSETKCTLKSFTVEKGIYQTSNFRVQPTESIVRFPNITNLCPFGEVFNATRFASVYAWNRKRISNCVADYSVLYNSASFSTFKCYGVSPTKLNDLCFTNVYADSFVIRGDEVRQIAPGQTGKIADYNYKLPDDFTGCVIAWNSNNLDSKVGGNYNYLYRLFRKSNLKPFERDISTEIYQAGSTPCNGVEGFNCYFPLQSYGFQPTNGVGYQPYRVVVLSFELLHAPATVCGPKKSTNLVKNKCVNFNFNGLTGTGVLTESNKKFLPFQQFGRDIADTTDAVRDPQTLEILDITPCSFGGVSVITPGTNTSNQVAVLYQDVNCTEVPVAIHADQLTPTWRVYSTGSNVFQTRAGCLIGAEHVNNSYECDIPIGAGICASYQTQTNSPRRARSVASQSIIAYTMSLGAENSVAYSNNSIAIPTNFTISVTTEILPVSMTKTSVDCTMYICGDSTECSNLLLQYGSFCTQLNRALTGIAVEQDKNTQEVFAQVKQIYKTPPIKDFGGFNFSQILPDPSKPSKRSFIEDLLFNKVTLADAGFIKQYGDCLGDIAARDLICAQKFNGLTVLPPLLTDEMIAQYTSALLAGTITSGWTFGAGAALQIPFAMQMAYRFNGIGVTQNVLYENQKLIANQFNSAIGKIQDSLSSTASALGKLQDVVNQNAQALNTLVKQLSSNFGAISSVLNDILSRLDKVEAEVQIDRLITGRLQSLQTYVTQQLIRAAEIRASANLAATKMSECVLGQSKRVDFCGKGYHLMSFPQSAPHGVVFLHVTYVPAQEKNFTTAPAICHDGKAHFPREGVFVSNGTHWFVTQRNFYEPQIITTDNTFVSGNCDVVIGIVNNTVYDPLQPELDSFKEELDKYFKNHTSPDVDLGDISGINASVVNIQKEIDRLNEVAKNLNESLIDLQELGKYEQYIKWPWLWYIKIFIMIVGGLIGLRIVFAVLSLVNRVRQGYSPLSFQTLTPVPRGPDRPEGTEEGGGEQDRNRSIRLVSGFLALAWDDLRSLCLFSYHRLRDLILIATRIVELLGHRGWEAIKYLWNLLLYWGRELKISAINLIDTIAIVVAGWTDRVIEIGQGIGRAILHIPRRIRQGLERSLL

SEQ ID NO: 107 - protein, 1257 aa, Artificial Sequence
  Chemically Synthesized
MFVFLVLLPLVSSQCVNLTTRTQLPPAYTNSFTRGVYYPDKVFRSSVLHSTQDLFLPFFSNVTWFHAIHVSGTNGTKRFDNPVLPFNDGVYFASTEKSNIIRGWIFGTTLDSKTQSLLIVNNATNVVIKVCEFQFCNDPFLGVYYHKNNKSWMESEFRVYSSANNCTFEYVSQPFLMDLEGKQGNFKNLREFVFKNIDGYFKIYSKHTPINLVRDLPQGFSALEPLVDLPIGINITRFQTLLALHRSYLTPGDSSSGWTAGAAAYYVGYLQPRTFLLKYNENGTITDAVDCALDPLSETKCTLKSFTVEKGIYQTSNFRVQPTESIVRFPNITNLCPFGEVFNATRFASVYAWNRKRISNCVADYSVLYNSASFSTFKCYGVSPTKLNDLCFTNVYADSFVIRGDEVRQIAPGQTGKIADYNYKLPDDFTGCVIAWNSNNLDSKVGGNYNYLYRLFRKSNLKPFERDISTEIYQAGSTPCNGVEGFNCYFPLQSYGFQPTNGVGYQPYRVVVLSFELLHAPATVCGPKKSTNLVKNKCVNFNFNGLTGTGVLTESNKKFLPFQQFGRDIADTTDAVRDPQTLEILDITPCSFGGVSVITPGTNTSNQVAVLYQDVNCTEVPVAIHADQLTPTWRVYSTGSNVFQTRAGCLIGAEHVNNSYECDIPIGAGICASYQTQTNSPRRARSVASQSIIAYTMSLGAENSVAYSNNSIAIPTNFTISVTTEILPVSMTKTSVDCTMYICGDSTECSNLLLQYGSFCTQLNRALTGIAVEQDKNTQEVFAQVKQIYKTPPIKDFGGFNFSQILPDPSKPSKRSFIEDLLFNKVTLADAGFIKQYGDCLGDIAARDLICAQKFNGLTVLPPLLTDEMIAQYTSALLAGTITSGWTFGAGAALQIPFAMQMAYRFNGIGVTQNVLYENQKLIANQFNSAIGKIQDSLSSTASALGKLQDVVNQNAQALNTLVKQLSSNFGAISSVLNDILSRLDKVEAEVQIDRLITGRLQSLQTYVTQQLIRAAEIRASANLAATKMSECVLGQSKRVDFCGKGYHLMSFPQSAPHGVVFLHVTYVPAQEKNFTTAPAICHDGKAHFPREGVFVSNGTHWFVTQRNFYEPQIITTDNTFVSGNCDVVIGIVNNTVYDPLQPELDSFKEELDKYFKNHTSPDVDLGDISGINASVVNIQKEIDRLNEVAKNLNESLIDLQELGKYEQYIKWPFFFIIGLIIGLFLVLRVGIHLCIKLKHTKKRQIYTDIEMNRLGK

SEQ ID NO: 108 - protein, 1255 aa, Artificial Sequence
  Chemically Synthesized
MFIFLLFLTLTSGSDLDRCTTFDDVQAPNYTQHTSSMRGVYYPDEIFRSDTLYLTQDLFLPFYSNVTGFHTINHTFDNPVIPFKDGIYFAATEKSNVVRGWVFGSTMNNKSQSVIIINNSTNVVIRACNFELCDNPFFAVSKPMGTQTHTMIFDNAFNCTFEYISDAFSLDVSEKSGNFKHLREFVFKNKDGFLYVYKGYQPIDVVRDLPSGFNTLKPIFKLPLGINITNFRAILTAFSPAQDTWGTSAAAYFVGYLKPTTFMLKYDENGTITDAVDCSQNPLAELKCSVKSFEIDKGIYQTSNFRVVPSGDVVRFPNITNLCPFGEVFNATKFPSVYAWERKKISNCVADYSVLYNSTFFSTFKCYGVSATKLNDLCFSNVYADSFVVKGDDVRQIAPGQTGVIADYNYKLPDDFMGCVLAWNTRNIDATSTGNYNYKYRYLRHGKLRPFERDISNVPFSPDGKPCTPPALNCYWPLNDYGFYTTTGIGYQPYRVVVLSFELLNAPATVCGPKLSTDLIKNQCVNFNFNGLTGTGVLTPSSKRFQPFQQFGRDVSDFTDSVRDPKTSEILDISPCSFGGVSVITPGTNASSEVAVLYQDVNCTDVSTAIHADQLTPAWRIYSTGNNVFQTQAGCLIGAEHVDTSYECDIPIGAGICASYHTVSLLRSTSQKSIVAYTMSLGADSSIAYSNNTIAIPTNFSISITTEVMPVSMAKTSVDCNMYICGDSTECANLLLQYGSFCTQLNRALSGIAAEQDRNTREVFAQVKQMYKTPTLKYFGGFNFSQILPDPLKPTKRSFIEDLLFNKVTLADAGFMKQYGECLGDINARDLICAQKFNGLTVLPPLLTDDMIAAYTAALVSGTATAGWTFGAGAALQIPFAMQMAYRFNGIGVTQNVLYENQKQIANQFNKAISQIQESLTTTSTALGKLQDVVNQNAQALNTLVKQLSSNFGAISSVLNDILSRLDKVEAEVQIDRLITGRLQSLQTYVTQQLIRAAEIRASANLAATKMSECVLGQSKRVDFCGKGYHLMSFPQAAPHGVVFLHVTYVPSQERNFTTAPAICHEGKAYFPREGVFVFNGTSWFITQRNFFSPQIITTDNTFVSGNCDVVIGIINNTVYDPLQPELDSFKEELDKYFKNHTSPDVDLGDISGINASVVNIQKEIDRLNEVAKNLNESLIDLQELGKYEQYIKWPWYVWLGFIAGLIAIVMVTILLCCMTSCCSCLKGACSCGSCCKFDEDDSEPVLKGVKLHYT

SEQ ID NO: 109 - protein, 1241 aa, Artificial Sequence
  Chemically Synthesized
MPMGSLQPLATLYLLGMLVASVLASGSDLDRCTTFDDVQAPNYTQHTSSMRGVYYPDEIFRSDTLYLTQDLFLPFYSNVTGFHTINHTFDNPVIPFKDGIYFAATEKSNVVRGWVFGSTMNNKSQSVIIINNSTNVVIRACNFELCDNPFFAVSKPMGTQTHTMIFDNAFNCTFEYISDAFSLDVSEKSGNFKHLREFVFKNKDGFLYVYKGYQPIDVVRDLPSGFNTLKPIFKLPLGINITNFRAILTAFSPAQDTWGTSAAAYFVGYLKPTTFMLKYDENGTITDAVDCSQNPLAELKCSVKSFEIDKGIYQTSNFRVVPSGDVVRFPNITNLCPFGEVFNATKFPSVYAWERKKISNCVADYSVLYNSTFFSTFKCYGVSATKLNDLCFSNVYADSFVVKGDDVRQIAPGQTGVIADYNYKLPDDFMGCVLAWNTRNIDATSTGNYNYKYRYLRHGKLRPFERDISNVPFSPDGKPCTPPALNCYWPLNDYGFYTTTGIGYQPYRVVVLSFELLNAPATVCGPKLSTDLIKNQCVNFNFNGLTGTGVLTPSSKRFQPFQQFGRDVSDFTDSVRDPKTSEILDISPCSFGGVSVITPGTNASSEVAVLYQDVNCTDVSTAIHADQLTPAWRIYSTGNNVFQTQAGCLIGAEHVDTSYECDIPIGAGICASYHTVSLLRSTSQKSIVAYTMSLGADSSIAYSNNTIAIPTNFSISITTEVMPVSMAKTSVDCNMYICGDSTECANLLLQYGSFCTQLNRALSGIAAEQDRNTREVFAQVKQMYKTPTLKYFGGFNFSQILPDPLKPTKRSFIEDLLFNKVTLADAGFMKQYGECLGDINARDLICAQKFNGLTVLPPLLTDDMIAAYTAALVSGTATAGWTFGAGAALQIPFAMQMAYRFNGIGVTQNVLYENQKQIANQFNKAISQIQESLTTTSTALGKLQDVVNQNAQALNTLVKQLSSNFGAISSVLNDILSRLDKVEAEVQIDRLITGRLQSLQTYVTQQLIRAAEIRASANLAATKMSECVLGQSKRVDFCGKGYHLMSFPQAAPHGVVFLHVTYVPSQERNFTTAPAICHEGKAYFPREGVFVFNGTSWFITQRNFFSPQIITTDNTFVSGNCDVVIGIINNTVYDPLQPELDSFKEELDKYFKNHTSPDVDLGDISGINASVVNIQKEIDRLNEVAKNLNESLIDLQELGKYEQYIKWPWYVWLGFIAGLIAIVMVTILLCCMTSCCSCLKG

SEQ ID NO: 110 - protein, 1252 aa, Artificial Sequence
  Chemically Synthesized
MPMGSLQPLATLYLLGMLVASVLASGSDLDRCTTFDDVQAPNYTQHTSSMRGVYYPDEIFRSDTLYLTQDLFLPFYSNVTGFHTINHTFDNPVIPFKDGIYFAATEKSNVVRGWVFGSTMNNKSQSVIIINNSTNVVIRACNFELCDNPFFAVSKPMGTQTHTMIFDNAFNCTFEYISDAFSLDVSEKSGNFKHLREFVFKNKDGFLYVYKGYQPIDVVRDLPSGFNTLKPIFKLPLGINITNFRAILTAFSPAQDTWGTSAAAYFVGYLKPTTFMLKYDENGTITDAVDCSQNPLAELKCSVKSFEIDKGIYQTSNFRVVPSGDVVRFPNITNLCPFGEVFNATKFPSVYAWERKKISNCVADYSVLYNSTFFSTFKCYGVSATKLNDLCFSNVYADSFVVKGDDVRQIAPGQTGVIADYNYKLPDDFMGCVLAWNTRNIDATSTGNYNYKYRYLRHGKLRPFERDISNVPFSPDGKPCTPPALNCYWPLNDYGFYTTTGIGYQPYRVVVLSFELLNAPATVCGPKLSTDLIKNQCVNFNFNGLTGTGVLTPSSKRFQPFQQFGRDVSDFTDSVRDPKTSEILDISPCSFGGVSVITPGTNASSEVAVLYQDVNCTDVSTAIHADQLTPAWRIYSTGNNVFQTQAGCLIGAEHVDTSYECDIPIGAGICASYHTVSLLRSTSQKSIVAYTMSLGADSSIAYSNNTIAIPTNFSISITTEVMPVSMAKTSVDCNMYICGDSTECANLLLQYGSFCTQLNRALSGIAAEQDRNTREVFAQVKQMYKTPTLKYFGGFNFSQILPDPLKPTKRSFIEDLLFNKVTLADAGFMKQYGECLGDINARDLICAQKFNGLTVLPPLLTDDMIAAYTAALVSGTATAGWTFGAGAALQIPFAMQMAYRFNGIGVTQNVLYENQKQIANQFNKAISQIQESLTTTSTALGKLQDVVNQNAQALNTLVKQLSSNFGAISSVLNDILSRLDKVEAEVQIDRLITGRLQSLQTYVTQQLIRAAEIRASANLAATKMSECVLGQSKRVDFCGKGYHLMSFPQAAPHGVVFLHVTYVPSQERNFTTAPAICHEGKAYFPREGVFVFNGTSWFITQRNFFSPQIITTDNTFVSGNCDVVIGIINNTVYDPLQPELDSFKEELDKYFKNHTSPDVDLGDISGINASVVNIQKEIDRLNEVAKNLNESLIDLQELGKYEQYIKWPFFFIIGLIIGLFLVLRVGIHLCIKLKHTKKRQIYTDIEMNRLGK

SEQ ID NO: 111 - protein, 1259 aa, Artificial Sequence
  Chemically Synthesized
MPMGSLQPLATLYLLGMLVASVLASSQCVNLTTRTQLPPAYTNSFTRGVYYPDKVFRSSVLHSTQDLFLPFFSNVTWFHAIHVSGTNGTKRFDNPVLPFNDGVYFASTEKSNIIRGWIFGTTLDSKTQSLLIVNNATNVVIKVCEFQFCNDPFLGVYYHKNNKSWMESEFRVYSSANNCTFEYVSQPFLMDLEGKQGNFKNLREFVFKNIDGYFKIYSKHTPINLVRDLPQGFSALEPLVDLPIGINITRFQTLLALHRSYLTPGDSSSGWTAGAAAYYVGYLQPRTFLLKYNENGTITDAVDCALDPLSETKCTLKSFTVEKGIYQTSNFRVQPTESIVRFPNITNLCPFGEVFNATRFASVYAWNRKRISNCVADYSVLYNSASFSTFKCYGVSPTKLNDLCFTNVYADSFVIRGDEVRQIAPGQTGKIADYNYKLPDDFTGCVIAWNSNNLDSKVGGNYNYLYRLFRKSNLKPFERDISTEIYQAGSTPCNGVEGFNCYFPLQSYGFQPTNGVGYQPYRVVVLSFELLHAPATVCGPKKSTNLVKNKCVNFNFNGLTGTGVLTESNKKFLPFQQFGRDIADTTDAVRDPQTLEILDITPCSFGGVSVITPGTNTSNQVAVLYQDVNCTEVPVAIHADQLTPTWRVYSTGSNVFQTRAGCLIGAEHVNNSYECDIPIGAGICASYQTQTNSPRRARSVASQSIIAYTMSLGAENSVAYSNNSIAIPTNFTISVTTEILPVSMTKTSVDCTMYICGDSTECSNLLLQYGSFCTQLNRALTGIAVEQDKNTQEVFAQVKQIYKTPPIKDFGGFNFSQILPDPSKPSKRSFIEDLLFNKVTLADAGFIKQYGDCLGDIAARDLICAQKFNGLTVLPPLLTDEMIAQYTSALLAGTITSGWTFGAGAALQIPFAMQMAYRFNGIGVTQNVLYENQKLIANQFNSAIGKIQDSLSSTASALGKLQDVVNQNAQALNTLVKQLSSNFGAISSVLNDILSRLDKVEAEVQIDRLITGRLQSLQTYVTQQLIRAAEIRASANLAATKMSECVLGQSKRVDFCGKGYHLMSFPQSAPHGVVFLHVTYVPAQEKNFTTAPAICHDGKAHFPREGVFVSNGTHWFVTQRNFYEPQIITTDNTFVSGNCDVVIGIVNNTVYDPLQPELDSFKEELDKYFKNHTSPDVDLGDISGINASVVNIQKEIDRLNEVAKNLNESLIDLQELGKYEQYIKWPWYIWLGFIAGLIAIVMVTIMLCCMTSCCSCLKG

SEQ ID NO: 112 - protein, 1270 aa, Artificial Sequence
  Chemically Synthesized
MPMGSLQPLATLYLLGMLVASVLASSQCVNLTTRTQLPPAYTNSFTRGVYYPDKVFRSSVLHSTQDLFLPFFSNVTWFHAIHVSGTNGTKRFDNPVLPFNDGVYFASTEKSNIIRGWIFGTTLDSKTQSLLIVNNATNVVIKVCEFQFCNDPFLGVYYHKNNKSWMESEFRVYSSANNCTFEYVSQPFLMDLEGKQGNFKNLREFVFKNIDGYFKIYSKHTPINLVRDLPQGFSALEPLVDLPIGINITRFQTLLALHRSYLTPGDSSSGWTAGAAAYYVGYLQPRTFLLKYNENGTITDAVDCALDPLSETKCTLKSFTVEKGIYQTSNFRVQPTESIVRFPNITNLCPFGEVFNATRFASVYAWNRKRISNCVADYSVLYNSASFSTFKCYGVSPTKLNDLCFTNVYADSFVIRGDEVRQIAPGQTGKIADYNYKLPDDFTGCVIAWNSNNLDSKVGGNYNYLYRLFRKSNLKPFERDISTEIYQAGSTPCNGVEGFNCYFPLQSYGFQPTNGVGYQPYRVVVLSFELLHAPATVCGPKKSTNLVKNKCVNFNFNGLTGTGVLTESNKKFLPFQQFGRDIADTTDAVRDPQTLEILDITPCSFGGVSVITPGTNTSNQVAVLYQDVNCTEVPVAIHADQLTPTWRVYSTGSNVFQTRAGCLIGAEHVNNSYECDIPIGAGICASYQTQTNSPRRARSVASQSIIAYTMSLGAENSVAYSNNSIAIPTNFTISVTTEILPVSMTKTSVDCTMYICGDSTECSNLLLQYGSFCTQLNRALTGIAVEQDKNTQEVFAQVKQIYKTPPIKDFGGFNFSQILPDPSKPSKRSFIEDLLFNKVTLADAGFIKQYGDCLGDIAARDLICAQKFNGLTVLPPLLTDEMIAQYTSALLAGTITSGWTFGAGAALQIPFAMQMAYRFNGIGVTQNVLYENQKLIANQFNSAIGKIQDSLSSTASALGKLQDVVNQNAQALNTLVKQLSSNFGAISSVLNDILSRLDKVEAEVQIDRLITGRLQSLQTYVTQQLIRAAEIRASANLAATKMSECVLGQSKRVDFCGKGYHLMSFPQSAPHGVVFLHVTYVPAQEKNFTTAPAICHDGKAHFPREGVFVSNGTHWFVTQRNFYEPQIITTDNTFVSGNCDVVIGIVNNTVYDPLQPELDSFKEELDKYFKNHTSPDVDLGDISGINASVVNIQKEIDRLNEVAKNLNESLIDLQELGKYEQYIKWPFFFIIGLIIGLFLVLRVGIHLCIKLKHTKKRQIYTDIEMNRLGK

SEQ ID NO: 113 - protein, 1273 aa, Artificial Sequence
  Chemically Synthesized
MFVFLVLLPLVSSQCVNLTTRTQLPPAYTNSFTRGVYYPDKVFRSSVLHSTQDLFLPFFSNVTWFHAIHVSGTNGTKRFDNPVLPFNDGVYFASTEKSNIIRGWIFGTTLDSKTQSLLIVNNATNVVIKVCEFQFCNDPFLGVYYHKNNKSWMESEFRVYSSANNCTFEYVSQPFLMDLEGKQGNFKNLREFVFKNIDGYFKIYSKHTPINLVRDLPQGFSALEPLVDLPIGINITRFQTLLALHRSYLTPGDSSSGWTAGAAAYYVGYLQPRTFLLKYNENGTITDAVDCALDPLSETKCTLKSFTVEKGIYQTSNFRVQPTESIVRFPNITNLCPFGEVFNATRFASVYAWNRKRISNCVADYSVLYNSASFSTFKCYGVSPTKLNDLCFTNVYADSFVIRGDEVRQIAPGQTGKIADYNYKLPDDFTGCVIAWNSNNLDSKVGGNYNYLYRLFRKSNLKPFERDISTEIYQAGSTPCNGVEGFNCYFPLQSYGFQPTYGVGYQPYRVVVLSFELLHAPATVCGPKKSTNLVKNKCVNFNFNGLTGTGVLTESNKKFLPFQQFGRDIADTTDAVRDPQTLEILDITPCSFGGVSVITPGTNTSNQVAVLYQDVNCTEVPVAIHADQLTPTWRVYSTGSNVFQTRAGCLIGAEHVNNSYECDIPIGAGICASYQTQTNSPRRARSVASQSIIAYTMSLGAENSVAYSNNSIAIPTNFTISVTTEILPVSMTKTSVDCTMYICGDSTECSNLLLQYGSFCTQLNRALTGIAVEQDKNTQEVFAQVKQIYKTPPIKDFGGFNFSQILPDPSKPSKRSFIEDLLFNKVTLADAGFIKQYGDCLGDIAARDLICAQKFNGLTVLPPLLTDEMIAQYTSALLAGTITSGWTFGAGAALQIPFAMQMAYRFNGIGVTQNVLYENQKLIANQFNSAIGKIQDSLSSTASALGKLQDVVNQNAQALNTLVKQLSSNFGAISSVLNDILSRLDKVEAEVQIDRLITGRLQSLQTYVTQQLIRAAEIRASANLAATKMSECVLGQSKRVDFCGKGYHLMSFPQSAPHGVVFLHVTYVPAQEKNFTTAPAICHDGKAHFPREGVFVSNGTHWFVTQRNFYEPQIITTDNTFVSGNCDVVIGIVNNTVYDPLQPELDSFKEELDKYFKNHTSPDVDLGDISGINASVVNIQKEIDRLNEVAKNLNESLIDLQELGKYEQYIKWPWYIWLGFIAGLIAIVMVTIMLCCMTSCCSCLKGCCSCGSCCKFDEDDSEPVLKGVKLHYT

SEQ ID NO: 114 - protein, 1259 aa, Artificial Sequence
  Chemically Synthesized
MPMGSLQPLATLYLLGMLVASVLASSQCVNLTTRTQLPPAYTNSFTRGVYYPDKVFRSSVLHSTQDLFLPFFSNVTWFHAIHVSGTNGTKRFDNPVLPFNDGVYFASTEKSNIIRGWIFGTTLDSKTQSLLIVNNATNVVIKVCEFQFCNDPFLGVYYHKNNKSWMESEFRVYSSANNCTFEYVSQPFLMDLEGKQGNFKNLREFVFKNIDGYFKIYSKHTPINLVRDLPQGFSALEPLVDLPIGINITRFQTLLALHRSYLTPGDSSSGWTAGAAAYYVGYLQPRTFLLKYNENGTITDAVDCALDPLSETKCTLKSFTVEKGIYQTSNFRVQPTESIVRFPNITNLCPFGEVFNATRFASVYAWNRKRISNCVADYSVLYNSASFSTFKCYGVSPTKLNDLCFTNVYADSFVIRGDEVRQIAPGQTGKIADYNYKLPDDFTGCVIAWNSNNLDSKVGGNYNYLYRLFRKSNLKPFERDISTEIYQAGSTPCNGVEGFNCYFPLQSYGFQPTYGVGYQPYRVVVLSFELLHAPATVCGPKKSTNLVKNKCVNFNFNGLTGTGVLTESNKKFLPFQQFGRDIADTTDAVRDPQTLEILDITPCSFGGVSVITPGTNTSNQVAVLYQDVNCTEVPVAIHADQLTPTWRVYSTGSNVFQTRAGCLIGAEHVNNSYECDIPIGAGICASYQTQTNSPRRARSVASQSIIAYTMSLGAENSVAYSNNSIAIPTNFTISVTTEILPVSMTKTSVDCTMYICGDSTECSNLLLQYGSFCTQLNRALTGIAVEQDKNTQEVFAQVKQIYKTPPIKDFGGFNFSQILPDPSKPSKRSFIEDLLFNKVTLADAGFIKQYGDCLGDIAARDLICAQKFNGLTVLPPLLTDEMIAQYTSALLAGTITSGWTFGAGAALQIPFAMQMAYRFNGIGVTQNVLYENQKLIANQFNSAIGKIQDSLSSTASALGKLQDVVNQNAQALNTLVKQLSSNFGAISSVLNDILSRLDKVEAEVQIDRLITGRLQSLQTYVTQQLIRAAEIRASANLAATKMSECVLGQSKRVDFCGKGYHLMSFPQSAPHGVVFLHVTYVPAQEKNFTTAPAICHDGKAHFPREGVFVSNGTHWFVTQRNFYEPQIITTDNTFVSGNCDVVIGIVNNTVYDPLQPELDSFKEELDKYFKNHTSPDVDLGDISGINASVVNIQKEIDRLNEVAKNLNESLIDLQELGKYEQYIKWPWYIWLGFIAGLIAIVMVTIMLCCMTSCCSCLKG

SEQ ID NO: 115 - protein, 1273 aa, Artificial Sequence
  Chemically Synthesized
MFVFLVLLPLVSSQCVNLTTRTQLPPAYTNSFTRGVYYPDKVFRSSVLHSTQDLFLPFFSNVTWFHAIHVSGTNGTKRFDNPVLPFNDGVYFASTEKSNIIRGWIFGTTLDSKTQSLLIVNNATNVVIKVCEFQFCNDPFLGVYYHKNNKSWMESEFRVYSSANNCTFEYVSQPFLMDLEGKQGNFKNLREFVFKNIDGYFKIYSKHTPINLVRDLPQGFSALEPLVDLPIGINITRFQTLLALHRSYLTPGDSSSGWTAGAAAYYVGYLQPRTFLLKYNENGTITDAVDCALDPLSETKCTLKSFTVEKGIYQTSNFRVQPTESIVRFPNITNLCPFGEVFNATRFASVYAWNRKRISNCVADYSVLYNSASFSTFKCYGVSPTKLNDLCFTNVYADSFVIRGDEVRQIAPGQTGKIADYNYKLPDDFTGCVIAWNSNNLDSKVGGNYNYLYRLFRKSNLKPFERDISTEIYQAGSTPCNGVEGFNCYFPLQSYGFQPTNGVGYQPYRVVVLSFELLHAPATVCGPKKSTNLVKNKCVNFNFNGLTGTGVLTESNKKFLPFQQFGRDIADTTDAVRDPQTLEILDITPCSFGGVSVITPGTNTSNQVAVLYQGVNCTEVPVAIHADQLTPTWRVYSTGSNVFQTRAGCLIGAEHVNNSYECDIPIGAGICASYQTQTNSPRRARSVASQSIIAYTMSLGAENSVAYSNNSIAIPTNFTISVTTEILPVSMTKTSVDCTMYICGDSTECSNLLLQYGSFCTQLNRALTGIAVEQDKNTQEVFAQVKQIYKTPPIKDFGGFNFSQILPDPSKPSKRSFIEDLLFNKVTLADAGFIKQYGDCLGDIAARDLICAQKFNGLTVLPPLLTDEMIAQYTSALLAGTITSGWTFGAGAALQIPFAMQMAYRFNGIGVTQNVLYENQKLIANQFNSAIGKIQDSLSSTASALGKLQDVVNQNAQALNTLVKQLSSNFGAISSVLNDILSRLDKVEAEVQIDRLITGRLQSLQTYVTQQLIRAAEIRASANLAATKMSECVLGQSKRVDFCGKGYHLMSFPQSAPHGVVFLHVTYVPAQEKNFTTAPAICHDGKAHFPREGVFVSNGTHWFVTQRNFYEPQIITTDNTFVSGNCDVVIGIVNNTVYDPLQPELDSFKEELDKYFKNHTSPDVDLGDISGINASVVNIQKEIDRLNEVAKNLNESLIDLQELGKYEQYIKWPWYIWLGFIAGLIAIVMVTIMLCCMTSCCSCLKGCCSCGSCCKFDEDDSEPVLKGVKLHYT

SEQ ID NO: 116 - protein, 1259 aa, Artificial Sequence
  Chemically Synthesized
MPMGSLQPLATLYLLGMLVASVLASSQCVNLTTRTQLPPAYTNSFTRGVYYPDKVFRSSVLHSTQDLFLPFFSNVTWFHAIHVSGTNGTKRFDNPVLPFNDGVYFASTEKSNIIRGWIFGTTLDSKTQSLLIVNNATNVVIKVCEFQFCNDPFLGVYYHKNNKSWMESEFRVYSSANNCTFEYVSQPFLMDLEGKQGNFKNLREFVFKNIDGYFKIYSKHTPINLVRDLPQGFSALEPLVDLPIGINITRFQTLLALHRSYLTPGDSSSGWTAGAAAYYVGYLQPRTFLLKYNENGTITDAVDCALDPLSETKCTLKSFTVEKGIYQTSNFRVQPTESIVRFPNITNLCPFGEVFNATRFASVYAWNRKRISNCVADYSVLYNSASFSTFKCYGVSPTKLNDLCFTNVYADSFVIRGDEVRQIAPGQTGKIADYNYKLPDDFTGCVIAWNSNNLDSKVGGNYNYLYRLFRKSNLKPFERDISTEIYQAGSTPCNGVEGFNCYFPLQSYGFQPTNGVGYQPYRVVVLSFELLHAPATVCGPKKSTNLVKNKCVNFNFNGLTGTGVLTESNKKFLPFQQFGRDIADTTDAVRDPQTLEILDITPCSFGGVSVITPGTNTSNQVAVLYQGVNCTEVPVAIHADQLTPTWRVYSTGSNVFQTRAGCLIGAEHVNNSYECDIPIGAGICASYQTQTNSPRRARSVASQSIIAYTMSLGAENSVAYSNNSIAIPTNFTISVTTEILPVSMTKTSVDCTMYICGDSTECSNLLLQYGSFCTQLNRALTGIAVEQDKNTQEVFAQVKQIYKTPPIKDFGGFNFSQILPDPSKPSKRSFIEDLLFNKVTLADAGFIKQYGDCLGDIAARDLICAQKFNGLTVLPPLLTDEMIAQYTSALLAGTITSGWTFGAGAALQIPFAMQMAYRFNGIGVTQNVLYENQKLIANQFNSAIGKIQDSLSSTASALGKLQDVVNQNAQALNTLVKQLSSNFGAISSVLNDILSRLDKVEAEVQIDRLITGRLQSLQTYVTQQLIRAAEIRASANLAATKMSECVLGQSKRVDFCGKGYHLMSFPQSAPHGVVFLHVTYVPAQEKNFTTAPAICHDGKAHFPREGVFVSNGTHWFVTQRNFYEPQIITTDNTFVSGNCDVVIGIVNNTVYDPLQPELDSFKEELDKYFKNHTSPDVDLGDISGINASVVNIQKEIDRLNEVAKNLNESLIDLQELGKYEQYIKWPWYIWLGFIAGLIAIVMVTIMLCCMTSCCSCLKG

SEQ ID NO: 117 - protein, 1273 aa, Artificial Sequence
  Chemically Synthesized
MFVFLVLLPLVSSQCVNLTTRTQLPPAYTNSFTRGVYYPDKVFRSSVLHSTQDLFLPFFSNVTWFHAIHVSGTNGTKRFDNPVLPFNDGVYFASTEKSNIIRGWIFGTTLDSKTQSLLIVNNATNVVIKVCEFQFCNDPFLGVYYHKNNKSWMESEFRVYSSANNCTFEYVSQPFLMDLEGKQGNFKNLREFVFKNIDGYFKIYSKHTPINLVRDLPQGFSALEPLVDLPIGINITRFQTLLALHRSYLTPGDSSSGWTAGAAAYYVGYLQPRTFLLKYNENGTITDAVDCALDPLSETKCTLKSFTVEKGIYQTSNFRVQPTESIVRFPNITNLCPFGEVFNATRFASVYAWNRKRISNCVADYSVLYNSASFSTFKCYGVSPTKLNDLCFTNVYADSFVIRGDEVRQIAPGQTGKIADYNYKLPDDFTGCVIAWNSNNLDSKVGGNYNYRYRLFRKSNLKPFERDISTEIYQAGSTPCNGVEGFNCYFPLQSYGFQPTNGVGYQPYRVVVLSFELLHAPATVCGPKKSTNLVKNKCVNFNFNGLTGTGVLTESNKKFLPFQQFGRDIADTTDAVRDPQTLEILDITPCSFGGVSVITPGTNTSNQVAVLYQDVNCTEVPVAIHADQLTPTWRVYSTGSNVFQTRAGCLIGAEHVNNSYECDIPIGAGICASYQTQTNSPRRARSVASQSIIAYTMSLGAENSVAYSNNSIAIPTNFTISVTTEILPVSMTKTSVDCTMYICGDSTECSNLLLQYGSFCTQLNRALTGIAVEQDKNTQEVFAQVKQIYKTPPIKDFGGFNFSQILPDPSKPSKRSFIEDLLFNKVTLADAGFIKQYGDCLGDIAARDLICAQKFNGLTVLPPLLTDEMIAQYTSALLAGTITSGWTFGAGAALQIPFAMQMAYRFNGIGVTQNVLYENQKLIANQFNSAIGKIQDSLSSTASALGKLQDVVNQNAQALNTLVKQLSSNFGAISSVLNDILSRLDKVEAEVQIDRLITGRLQSLQTYVTQQLIRAAEIRASANLAATKMSECVLGQSKRVDFCGKGYHLMSFPQSAPHGVVFLHVTYVPAQEKNFTTAPAICHDGKAHFPREGVFVSNGTHWFVTQRNFYEPQIITTDNTFVSGNCDVVIGIVNNTVYDPLQPELDSFKEELDKYFKNHTSPDVDLGDISGINASVVNIQKEIDRLNEVAKNLNESLIDLQELGKYEQYIKWPWYIWLGFIAGLIAIVMVTIMLCCMTSCCSCLKGCCSCGSCCKFDEDDSEPVLKGVKLHYT

SEQ ID NO: 118 - protein, 1259 aa, Artificial Sequence
  Chemically Synthesized
MPMGSLQPLATLYLLGMLVASVLASSQCVNLTTRTQLPPAYTNSFTRGVYYPDKVFRSSVLHSTQDLFLPFFSNVTWFHAIHVSGTNGTKRFDNPVLPFNDGVYFASTEKSNIIRGWIFGTTLDSKTQSLLIVNNATNVVIKVCEFQFCNDPFLGVYYHKNNKSWMESEFRVYSSANNCTFEYVSQPFLMDLEGKQGNFKNLREFVFKNIDGYFKIYSKHTPINLVRDLPQGFSALEPLVDLPIGINITRFQTLLALHRSYLTPGDSSSGWTAGAAAYYVGYLQPRTFLLKYNENGTITDAVDCALDPLSETKCTLKSFTVEKGIYQTSNFRVQPTESIVRFPNITNLCPFGEVFNATRFASVYAWNRKRISNCVADYSVLYNSASFSTFKCYGVSPTKLNDLCFTNVYADSFVIRGDEVRQIAPGQTGKIADYNYKLPDDFTGCVIAWNSNNLDSKVGGNYNYRYRLFRKSNLKPFERDISTEIYQAGSTPCNGVEGFNCYFPLQSYGFQPTNGVGYQPYRVVVLSFELLHAPATVCGPKKSTNLVKNKCVNFNFNGLTGTGVLTESNKKFLPFQQFGRDIADTTDAVRDPQTLEILDITPCSFGGVSVITPGTNTSNQVAVLYQDVNCTEVPVAIHADQLTPTWRVYSTGSNVFQTRAGCLIGAEHVNNSYECDIPIGAGICASYQTQTNSPRRARSVASQSIIAYTMSLGAENSVAYSNNSIAIPTNFTISVTTEILPVSMTKTSVDCTMYICGDSTECSNLLLQYGSFCTQLNRALTGIAVEQDKNTQEVFAQVKQIYKTPPIKDFGGFNFSQILPDPSKPSKRSFIEDLLFNKVTLADAGFIKQYGDCLGDIAARDLICAQKFNGLTVLPPLLTDEMIAQYTSALLAGTITSGWTFGAGAALQIPFAMQMAYRFNGIGVTQNVLYENQKLIANQFNSAIGKIQDSLSSTASALGKLQDVVNQNAQALNTLVKQLSSNFGAISSVLNDILSRLDKVEAEVQIDRLITGRLQSLQTYVTQQLIRAAEIRASANLAATKMSECVLGQSKRVDFCGKGYHLMSFPQSAPHGVVFLHVTYVPAQEKNFTTAPAICHDGKAHFPREGVFVSNGTHWFVTQRNFYEPQIITTDNTFVSGNCDVVIGIVNNTVYDPLQPELDSFKEELDKYFKNHTSPDVDLGDISGINASVVNIQKEIDRLNEVAKNLNESLIDLQELGKYEQYIKWPWYIWLGFIAGLIAIVMVTIMLCCMTSCCSCLKG

SEQ ID NO: 119 - protein, 1273 aa, Artificial Sequence
  Chemically Synthesized
MFVFLVLLPLVSSQCVNLTTRTQLPPAYTNSFTRGVYYPDKVFRSSVLHSTQDLFLPFFSNVTWFHAIHVSGTNGTKRFDNPVLPFNDGVYFASTEKSNIIRGWIFGTTLDSKTQSLLIVNNATNVVIKVCEFQFCNDPFLGVYYHKNNKSWMESEFRVYSSANNCTFEYVSQPFLMDLEGKQGNFKNLREFVFKNIDGYFKIYSKHTPINLVRDLPQGFSALEPLVDLPIGINITRFQTLLALHRSYLTPGDSSSGWTAGAAAYYVGYLQPRTFLLKYNENGTITDAVDCALDPLSETKCTLKSFTVEKGIYQTSNFRVQPTESIVRFPNITNLCPFGEVFNATRFASVYAWNRKRISNCVADYSVLYNSASFSTFKCYGVSPTKLNDLCFTNVYADSFVIRGDEVRQIAPGQTGKIADYNYKLPDDFTGCVIAWNSNNLDSKVGGNYNYLYRLFRKSNLKPFERDISTEIYQAGSTPCNGVKGFNCYFPLQSYGFQPTNGVGYQPYRVVVLSFELLHAPATVCGPKKSTNLVKNKCVNFNFNGLTGTGVLTESNKKFLPFQQFGRDIADTTDAVRDPQTLEILDITPCSFGGVSVITPGTNTSNQVAVLYQDVNCTEVPVAIHADQLTPTWRVYSTGSNVFQTRAGCLIGAEHVNNSYECDIPIGAGICASYQTQTNSPRRARSVASQSIIAYTMSLGAENSVAYSNNSIAIPTNFTISVTTEILPVSMTKTSVDCTMYICGDSTECSNLLLQYGSFCTQLNRALTGIAVEQDKNTQEVFAQVKQIYKTPPIKDFGGFNFSQILPDPSKPSKRSFIEDLLFNKVTLADAGFIKQYGDCLGDIAARDLICAQKFNGLTVLPPLLTDEMIAQYTSALLAGTITSGWTFGAGAALQIPFAMQMAYRFNGIGVTQNVLYENQKLIANQFNSAIGKIQDSLSSTASALGKLQDVVNQNAQALNTLVKQLSSNFGAISSVLNDILSRLDKVEAEVQIDRLITGRLQSLQTYVTQQLIRAAEIRASANLAATKMSECVLGQSKRVDFCGKGYHLMSFPQSAPHGVVFLHVTYVPAQEKNFTTAPAICHDGKAHFPREGVFVSNGTHWFVTQRNFYEPQIITTDNTFVSGNCDVVIGIVNNTVYDPLQPELDSFKEELDKYFKNHTSPDVDLGDISGINASVVNIQKEIDRLNEVAKNLNESLIDLQELGKYEQYIKWPWYIWLGFIAGLIAIVMVTIMLCCMTSCCSCLKGCCSCGSCCKFDEDDSEPVLKGVKLHYT

SEQ ID NO: 120 - protein, 1259 aa, Artificial Sequence
  Chemically Synthesized
MPMGSLQPLATLYLLGMLVASVLASSQCVNLTTRTQLPPAYTNSFTRGVYYPDKVFRSSVLHSTQDLFLPFFSNVTWFHAIHVSGTNGTKRFDNPVLPFNDGVYFASTEKSNIIRGWIFGTTLDSKTQSLLIVNNATNVVIKVCEFQFCNDPFLGVYYHKNNKSWMESEFRVYSSANNCTFEYVSQPFLMDLEGKQGNFKNLREFVFKNIDGYFKIYSKHTPINLVRDLPQGFSALEPLVDLPIGINITRFQTLLALHRSYLTPGDSSSGWTAGAAAYYVGYLQPRTFLLKYNENGTITDAVDCALDPLSETKCTLKSFTVEKGIYQTSNFRVQPTESIVRFPNITNLCPFGEVFNATRFASVYAWNRKRISNCVADYSVLYNSASFSTFKCYGVSPTKLNDLCFTNVYADSFVIRGDEVRQIAPGQTGKIADYNYKLPDDFTGCVIAWNSNNLDSKVGGNYNYLYRLFRKSNLKPFERDISTEIYQAGSTPCNGVKGFNCYFPLQSYGFQPTNGVGYQPYRVVVLSFELLHAPATVCGPKKSTNLVKNKCVNFNFNGLTGTGVLTESNKKFLPFQQFGRDIADTTDAVRDPQTLEILDITPCSFGGVSVITPGTNTSNQVAVLYQDVNCTEVPVAIHADQLTPTWRVYSTGSNVFQTRAGCLIGAEHVNNSYECDIPIGAGICASYQTQTNSPRRARSVASQSIIAYTMSLGAENSVAYSNNSIAIPTNFTISVTTEILPVSMTKTSVDCTMYICGDSTECSNLLLQYGSFCTQLNRALTGIAVEQDKNTQEVFAQVKQIYKTPPIKDFGGFNFSQILPDPSKPSKRSFIEDLLFNKVTLADAGFIKQYGDCLGDIAARDLICAQKFNGLTVLPPLLTDEMIAQYTSALLAGTITSGWTFGAGAALQIPFAMQMAYRFNGIGVTQNVLYENQKLIANQFNSAIGKIQDSLSSTASALGKLQDVVNQNAQALNTLVKQLSSNFGAISSVLNDILSRLDKVEAEVQIDRLITGRLQSLQTYVTQQLIRAAEIRASANLAATKMSECVLGQSKRVDFCGKGYHLMSFPQSAPHGVVFLHVTYVPAQEKNFTTAPAICHDGKAHFPREGVFVSNGTHWFVTQRNFYEPQIITTDNTFVSGNCDVVIGIVNNTVYDPLQPELDSFKEELDKYFKNHTSPDVDLGDISGINASVVNIQKEIDRLNEVAKNLNESLIDLQELGKYEQYIKWPWYIWLGFIAGLIAIVMVTIMLCCMTSCCSCLKG

SEQ ID NO: 121 - protein, 1273 aa, Artificial Sequence
  Chemically Synthesized
MFVFLVLLPLVSSQCVNLTTRTQLPPAYTNSFTRGVYYPDKVFRSSVLHSTQDLFLPFFSNVTWFHAIHVSGTNGTKRFDNPVLPFNDGVYFASTEKSNIIRGWIFGTTLDSKTQSLLIVNNATNVVIKVCEFQFCNDPFLGVYYHKNNKSWMESEFRVYSSANNCTFEYVSQPFLMDLEGKQGNFKNLREFVFKNIDGYFKIYSKHTPINLVRDLPQGFSALEPLVDLPIGINITRFQTLLALHRSYLTPGDSSSGWTAGAAAYYVGYLQPRTFLLKYNENGTITDAVDCALDPLSETKCTLKSFTVEKGIYQTSNFRVQPTESIVRFPNITNLCPFGEVFNATRFASVYAWNRKRISNCVADYSVLYNSASFSTFKCYGVSPTKLNDLCFTNVYADSFVIRGDEVRQIAPGQTGKIADYNYKLPDDFTGCVIAWNSNNLDSKVGGNYNYLYRLFRKSNLKPFERDISTEIYQAGSTPCNGVKGFNCYFPLQSYGFQPTYGVGYQPYRVVVLSFELLHAPATVCGPKKSTNLVKNKCVNFNFNGLTGTGVLTESNKKFLPFQQFGRDIADTTDAVRDPQTLEILDITPCSFGGVSVITPGTNTSNQVAVLYQDVNCTEVPVAIHADQLTPTWRVYSTGSNVFQTRAGCLIGAEHVNNSYECDIPIGAGICASYQTQTNSPRRARSVASQSIIAYTMSLGAENSVAYSNNSIAIPTNFTISVTTEILPVSMTKTSVDCTMYICGDSTECSNLLLQYGSFCTQLNRALTGIAVEQDKNTQEVFAQVKQIYKTPPIKDFGGFNFSQILPDPSKPSKRSFIEDLLFNKVTLADAGFIKQYGDCLGDIAARDLICAQKFNGLTVLPPLLTDEMIAQYTSALLAGTITSGWTFGAGAALQIPFAMQMAYRFNGIGVTQNVLYENQKLIANQFNSAIGKIQDSLSSTASALGKLQDVVNQNAQALNTLVKQLSSNFGAISSVLNDILSRLDKVEAEVQIDRLITGRLQSLQTYVTQQLIRAAEIRASANLAATKMSECVLGQSKRVDFCGKGYHLMSFPQSAPHGVVFLHVTYVPAQEKNFTTAPAICHDGKAHFPREGVFVSNGTHWFVTQRNFYEPQIITTDNTFVSGNCDVVIGIVNNTVYDPLQPELDSFKEELDKYFKNHTSPDVDLGDISGINASVVNIQKEIDRLNEVAKNLNESLIDLQELGKYEQYIKWPWYIWLGFIAGLIAIVMVTIMLCCMTSCCSCLKGCCSCGSCCKFDEDDSEPVLKGVKLHYT

SEQ ID NO: 122 - protein, 1259 aa, Artificial Sequence
  Chemically Synthesized
MPMGSLQPLATLYLLGMLVASVLASSQCVNLTTRTQLPPAYTNSFTRGVYYPDKVFRSSVLHSTQDLFLPFFSNVTWFHAIHVSGTNGTKRFDNPVLPFNDGVYFASTEKSNIIRGWIFGTTLDSKTQSLLIVNNATNVVIKVCEFQFCNDPFLGVYYHKNNKSWMESEFRVYSSANNCTFEYVSQPFLMDLEGKQGNFKNLREFVFKNIDGYFKIYSKHTPINLVRDLPQGFSALEPLVDLPIGINITRFQTLLALHRSYLTPGDSSSGWTAGAAAYYVGYLQPRTFLLKYNENGTITDAVDCALDPLSETKCTLKSFTVEKGIYQTSNFRVQPTESIVRFPNITNLCPFGEVFNATRFASVYAWNRKRISNCVADYSVLYNSASFSTFKCYGVSPTKLNDLCFTNVYADSFVIRGDEVRQIAPGQTGKIADYNYKLPDDFTGCVIAWNSNNLDSKVGGNYNYLYRLFRKSNLKPFERDISTEIYQAGSTPCNGVKGFNCYFPLQSYGFQPTYGVGYQPYRVVVLSFELLHAPATVCGPKKSTNLVKNKCVNFNFNGLTGTGVLTESNKKFLPFQQFGRDIADTTDAVRDPQTLEILDITPCSFGGVSVITPGTNTSNQVAVLYQDVNCTEVPVAIHADQLTPTWRVYSTGSNVFQTRAGCLIGAEHVNNSYECDIPIGAGICASYQTQTNSPRRARSVASQSIIAYTMSLGAENSVAYSNNSIAIPTNFTISVTTEILPVSMTKTSVDCTMYICGDSTECSNLLLQYGSFCTQLNRALTGIAVEQDKNTQEVFAQVKQIYKTPPIKDFGGFNFSQILPDPSKPSKRSFIEDLLFNKVTLADAGFIKQYGDCLGDIAARDLICAQKFNGLTVLPPLLTDEMIAQYTSALLAGTITSGWTFGAGAALQIPFAMQMAYRFNGIGVTQNVLYENQKLIANQFNSAIGKIQDSLSSTASALGKLQDVVNQNAQALNTLVKQLSSNFGAISSVLNDILSRLDKVEAEVQIDRLITGRLQSLQTYVTQQLIRAAEIRASANLAATKMSECVLGQSKRVDFCGKGYHLMSFPQSAPHGVVFLHVTYVPAQEKNFTTAPAICHDGKAHFPREGVFVSNGTHWFVTQRNFYEPQIITTDNTFVSGNCDVVIGIVNNTVYDPLQPELDSFKEELDKYFKNHTSPDVDLGDISGINASVVNIQKEIDRLNEVAKNLNESLIDLQELGKYEQYIKWPWYIWLGFIAGLIAIVMVTIMLCCMTSCCSCLKG

SEQ ID NO: 123 - protein, 1273 aa, Artificial Sequence
  Chemically Synthesized
MFVFLVLLPLVSSQCVNLTTRTQLPPAYTNSFTRGVYYPDKVFRSSVLHSTQDLFLPFFSNVTWFHAIHVSGTNGTKRFDNPVLPFNDGVYFASTEKSNIIRGWIFGTTLDSKTQSLLIVNNATNVVIKVCEFQFCNDPFLGVYYHKNNKSWMESEFRVYSSANNCTFEYVSQPFLMDLEGKQGNFKNLREFVFKNIDGYFKIYSKHTPINLVRDLPQGFSALEPLVDLPIGINITRFQTLLALHRSYLTPGDSSSGWTAGAAAYYVGYLQPRTFLLKYNENGTITDAVDCALDPLSETKCTLKSFTVEKGIYQTSNFRVQPTESIVRFPNITNLCPFGEVFNATRFASVYAWNRKRISNCVADYSVLYNSASFSTFKCYGVSPTKLNDLCFTNVYADSFVIRGDEVRQIAPGQTGNIADYNYKLPDDFTGCVIAWNSNNLDSKVGGNYNYLYRLFRKSNLKPFERDISTEIYQAGSTPCNGVKGFNCYFPLQSYGFQPTYGVGYQPYRVVVLSFELLHAPATVCGPKKSTNLVKNKCVNFNFNGLTGTGVLTESNKKFLPFQQFGRDIADTTDAVRDPQTLEILDITPCSFGGVSVITPGTNTSNQVAVLYQDVNCTEVPVAIHADQLTPTWRVYSTGSNVFQTRAGCLIGAEHVNNSYECDIPIGAGICASYQTQTNSPRRARSVASQSIIAYTMSLGAENSVAYSNNSIAIPTNFTISVTTEILPVSMTKTSVDCTMYICGDSTECSNLLLQYGSFCTQLNRALTGIAVEQDKNTQEVFAQVKQIYKTPPIKDFGGFNFSQILPDPSKPSKRSFIEDLLFNKVTLADAGFIKQYGDCLGDIAARDLICAQKFNGLTVLPPLLTDEMIAQYTSALLAGTITSGWTFGAGAALQIPFAMQMAYRFNGIGVTQNVLYENQKLIANQFNSAIGKIQDSLSSTASALGKLQDVVNQNAQALNTLVKQLSSNFGAISSVLNDILSRLDKVEAEVQIDRLITGRLQSLQTYVTQQLIRAAEIRASANLAATKMSECVLGQSKRVDFCGKGYHLMSFPQSAPHGVVFLHVTYVPAQEKNFTTAPAICHDGKAHFPREGVFVSNGTHWFVTQRNFYEPQIITTDNTFVSGNCDVVIGIVNNTVYDPLQPELDSFKEELDKYFKNHTSPDVDLGDISGINASVVNIQKEIDRLNEVAKNLNESLIDLQELGKYEQYIKWPWYIWLGFIAGLIAIVMVTIMLCCMTSCCSCLKGCCSCGSCCKFDEDDSEPVLKGVKLHYT

SEQ ID NO: 124 - protein, 1259 aa, Artificial Sequence
  Chemically Synthesized
MPMGSLQPLATLYLLGMLVASVLASSQCVNLTTRTQLPPAYTNSFTRGVYYPDKVFRSSVLHSTQDLFLPFFSNVTWFHAIHVSGTNGTKRFDNPVLPFNDGVYFASTEKSNIIRGWIFGTTLDSKTQSLLIVNNATNVVIKVCEFQFCNDPFLGVYYHKNNKSWMESEFRVYSSANNCTFEYVSQPFLMDLEGKQGNFKNLREFVFKNIDGYFKIYSKHTPINLVRDLPQGFSALEPLVDLPIGINITRFQTLLALHRSYLTPGDSSSGWTAGAAAYYVGYLQPRTFLLKYNENGTITDAVDCALDPLSETKCTLKSFTVEKGIYQTSNFRVQPTESIVRFPNITNLCPFGEVFNATRFASVYAWNRKRISNCVADYSVLYNSASFSTFKCYGVSPTKLNDLCFTNVYADSFVIRGDEVRQIAPGQTGNIADYNYKLPDDFTGCVIAWNSNNLDSKVGGNYNYLYRLFRKSNLKPFERDISTEIYQAGSTPCNGVKGFNCYFPLQSYGFQPTYGVGYQPYRVVVLSFELLHAPATVCGPKKSTNLVKNKCVNFNFNGLTGTGVLTESNKKFLPFQQFGRDIADTTDAVRDPQTLEILDITPCSFGGVSVITPGTNTSNQVAVLYQDVNCTEVPVAIHADQLTPTWRVYSTGSNVFQTRAGCLIGAEHVNNSYECDIPIGAGICASYQTQTNSPRRARSVASQSIIAYTMSLGAENSVAYSNNSIAIPTNFTISVTTEILPVSMTKTSVDCTMYICGDSTECSNLLLQYGSFCTQLNRALTGIAVEQDKNTQEVFAQVKQIYKTPPIKDFGGFNFSQILPDPSKPSKRSFIEDLLFNKVTLADAGFIKQYGDCLGDIAARDLICAQKFNGLTVLPPLLTDEMIAQYTSALLAGTITSGWTFGAGAALQIPFAMQMAYRFNGIGVTQNVLYENQKLIANQFNSAIGKIQDSLSSTASALGKLQDVVNQNAQALNTLVKQLSSNFGAISSVLNDILSRLDKVEAEVQIDRLITGRLQSLQTYVTQQLIRAAEIRASANLAATKMSECVLGQSKRVDFCGKGYHLMSFPQSAPHGVVFLHVTYVPAQEKNFTTAPAICHDGKAHFPREGVFVSNGTHWFVTQRNFYEPQIITTDNTFVSGNCDVVIGIVNNTVYDPLQPELDSFKEELDKYFKNHTSPDVDLGDISGINASVVNIQKEIDRLNEVAKNLNESLIDLQELGKYEQYIKWPWYIWLGFIAGLIAIVMVTIMLCCMTSCCSCLKG

SEQ ID NO: 125 - protein, 1273 aa, Artificial Sequence
  Chemically Synthesized
MFVFLVLLPLVSSQCVNLTTRTQLPPAYTNSFTRGVYYPDKVFRSSVLHSTQDLFLPFFSNVTWFHAIHVSGTNGTKRFDNPVLPFNDGVYFASTEKSNIIRGWIFGTTLDSKTQSLLIVNNATNVVIKVCEFQFCNDPFLGVYYHKNNKSWMESEFRVYSSANNCTFEYVSQPFLMDLEGKQGNFKNLREFVFKNIDGYFKIYSKHTPINLVRDLPQGFSALEPLVDLPIGINITRFQTLLALHRSYLTPGDSSSGWTAGAAAYYVGYLQPRTFLLKYNENGTITDAVDCALDPLSETKCTLKSFTVEKGIYQTSNFRVQPTESIVRFPNITNLCPFGEVFNATRFASVYAWNRKRISNCVADYSVLYNSASFSTFKCYGVSPTKLNDLCFTNVYADSFVIRGDEVRQIAPGQTGNIADYNYKLPDDFTGCVIAWNSNNLDSKVGGNYNYLYRLFRKSNLKPFERDISTEIYQAGSTPCNGVKGFNCYFPLQSYGFQPTYGVGYQPYRVVVLSFELLHAPATVCGPKKSTNLVKNKCVNFNFNGLTGTGVLTESNKKFLPFQQFGRDIADTTDAVRDPQTLEILDITPCSFGGVSVITPGTNTSNQVAVLYQGVNCTEVPVAIHADQLTPTWRVYSTGSNVFQTRAGCLIGAEHVNNSYECDIPIGAGICASYQTQTNSPRRARSVASQSIIAYTMSLGAENSVAYSNNSIAIPTNFTISVTTEILPVSMTKTSVDCTMYICGDSTECSNLLLQYGSFCTQLNRALTGIAVEQDKNTQEVFAQVKQIYKTPPIKDFGGFNFSQILPDPSKPSKRSFIEDLLFNKVTLADAGFIKQYGDCLGDIAARDLICAQKFNGLTVLPPLLTDEMIAQYTSALLAGTITSGWTFGAGAALQIPFAMQMAYRFNGIGVTQNVLYENQKLIANQFNSAIGKIQDSLSSTASALGKLQDVVNQNAQALNTLVKQLSSNFGAISSVLNDILSRLDKVEAEVQIDRLITGRLQSLQTYVTQQLIRAAEIRASANLAATKMSECVLGQSKRVDFCGKGYHLMSFPQSAPHGVVFLHVTYVPAQEKNFTTAPAICHDGKAHFPREGVFVSNGTHWFVTQRNFYEPQIITTDNTFVSGNCDVVIGIVNNTVYDPLQPELDSFKEELDKYFKNHTSPDVDLGDISGINASVVNIQKEIDRLNEVAKNLNESLIDLQELGKYEQYIKWPWYIWLGFIAGLIAIVMVTIMLCCMTSCCSCLKGCCSCGSCCKFDEDDSEPVLKGVKLHYT

SEQ ID NO: 126 - protein, 1259 aa, Artificial Sequence
  Chemically Synthesized
MPMGSLQPLATLYLLGMLVASVLASSQCVNLTTRTQLPPAYTNSFTRGVYYPDKVFRSSVLHSTQDLFLPFFSNVTWFHAIHVSGTNGTKRFDNPVLPFNDGVYFASTEKSNIIRGWIFGTTLDSKTQSLLIVNNATNVVIKVCEFQFCNDPFLGVYYHKNNKSWMESEFRVYSSANNCTFEYVSQPFLMDLEGKQGNFKNLREFVFKNIDGYFKIYSKHTPINLVRDLPQGFSALEPLVDLPIGINITRFQTLLALHRSYLTPGDSSSGWTAGAAAYYVGYLQPRTFLLKYNENGTITDAVDCALDPLSETKCTLKSFTVEKGIYQTSNFRVQPTESIVRFPNITNLCPFGEVFNATRFASVYAWNRKRISNCVADYSVLYNSASFSTFKCYGVSPTKLNDLCFTNVYADSFVIRGDEVRQIAPGQTGNIADYNYKLPDDFTGCVIAWNSNNLDSKVGGNYNYLYRLFRKSNLKPFERDISTEIYQAGSTPCNGVKGFNCYFPLQSYGFQPTYGVGYQPYRVVVLSFELLHAPATVCGPKKSTNLVKNKCVNFNFNGLTGTGVLTESNKKFLPFQQFGRDIADTTDAVRDPQTLEILDITPCSFGGVSVITPGTNTSNQVAVLYQGVNCTEVPVAIHADQLTPTWRVYSTGSNVFQTRAGCLIGAEHVNNSYECDIPIGAGICASYQTQTNSPRRARSVASQSIIAYTMSLGAENSVAYSNNSIAIPTNFTISVTTEILPVSMTKTSVDCTMYICGDSTECSNLLLQYGSFCTQLNRALTGIAVEQDKNTQEVFAQVKQIYKTPPIKDFGGFNFSQILPDPSKPSKRSFIEDLLFNKVTLADAGFIKQYGDCLGDIAARDLICAQKFNGLTVLPPLLTDEMIAQYTSALLAGTITSGWTFGAGAALQIPFAMQMAYRFNGIGVTQNVLYENQKLIANQFNSAIGKIQDSLSSTASALGKLQDVVNQNAQALNTLVKQLSSNFGAISSVLNDILSRLDKVEAEVQIDRLITGRLQSLQTYVTQQLIRAAEIRASANLAATKMSECVLGQSKRVDFCGKGYHLMSFPQSAPHGVVFLHVTYVPAQEKNFTTAPAICHDGKAHFPREGVFVSNGTHWFVTQRNFYEPQIITTDNTFVSGNCDVVIGIVNNTVYDPLQPELDSFKEELDKYFKNHTSPDVDLGDISGINASVVNIQKEIDRLNEVAKNLNESLIDLQELGKYEQYIKWPWYIWLGFIAGLIAIVMVTIMLCCMTSCCSCLKG

SEQ ID NO: 127 - protein, 1292 aa, Artificial Sequence
  Chemically Synthesized
MPMGSLQPLATLYLLGMLVASVLASSQCVNLTTRTQLPPAYTNSFTRGVYYPDKVFRSSVLHSTQDLFLPFFSNVTWFHAIHVSGTNGTKRFDNPVLPFNDGVYFASTEKSNIIRGWIFGTTLDSKTQSLLIVNNATNVVIKVCEFQFCNDPFLGVYYHKNNKSWMESEFRVYSSANNCTFEYVSQPFLMDLEGKQGNFKNLREFVFKNIDGYFKIYSKHTPINLVRDLPQGFSALEPLVDLPIGINITRFQTLLALHRSYLTPGDSSSGWTAGAAAYYVGYLQPRTFLLKYNENGTITDAVDCALDPLSETKCTLKSFTVEKGIYQTSNFRVQPTESIVRFPNITNLCPFGEVFNATRFASVYAWNRKRISNCVADYSVLYNSASFSTFKCYGVSPTKLNDLCFTNVYADSFVIRGDEVRQIAPGQTGKIADYNYKLPDDFTGCVIAWNSNNLDSKVGGNYNYLYRLFRKSNLKPFERDISTEIYQAGSTPCNGVEGFNCYFPLQSYGFQPTNGVGYQPYRVVVLSFELLHAPATVCGPKKSTNLVKNKCVNFNFNGLTGTGVLTESNKKFLPFQQFGRDIADTTDAVRDPQTLEILDITPCSFGGVSVITPGTNTSNQVAVLYQDVNCTEVPVAIHADQLTPTWRVYSTGSNVFQTRAGCLIGAEHVNNSYECDIPIGAGICASYQTQTNSPRRARSVASQSIIAYTMSLGAENSVAYSNNSIAIPTNFTISVTTEILPVSMTKTSVDCTMYICGDSTECSNLLLQYGSFCTQLNRALTGIAVEQDKNTQEVFAQVKQIYKTPPIKDFGGFNFSQILPDPSKPSKRSFIEDLLFNKVTLADAGFIKQYGDCLGDIAARDLICAQKFNGLTVLPPLLTDEMIAQYTSALLAGTITSGWTFGAGAALQIPFAMQMAYRFNGIGVTQNVLYENQKLIANQFNSAIGKIQDSLSSTASALGKLQDVVNQNAQALNTLVKQLSSNFGAISSVLNDILSRLDKVEAEVQIDRLITGRLQSLQTYVTQQLIRAAEIRASANLAATKMSECVLGQSKRVDFCGKGYHLMSFPQSAPHGVVFLHVTYVPAQEKNFTTAPAICHDGKAHFPREGVFVSNGTHWFVTQRNFYEPQIITTDNTFVSGNCDVVIGIVNNTVYDPLQPELDSFKEELDKYFKNHTSPDVDLGDISGINASVVNIQKEIDRLNEVAKNLNESLIDLQELGKYEQYIKWPWYIWLGFIAGLIAIVMVTIMLCCMTSCCSCLKGRMKQLEDKVEELLSKNYHLENEVARLKKLVGER

SEQ ID NO: 128 - protein, 1372 aa, Artificial Sequence
  Chemically Synthesized
MPMGSLQPLATLYLLGMLVASVLASSQCVNLTTRTQLPPAYTNSFTRGVYYPDKVFRSSVLHSTQDLFLPFFSNVTWFHAIHVSGTNGTKRFDNPVLPFNDGVYFASTEKSNIIRGWIFGTTLDSKTQSLLIVNNATNVVIKVCEFQFCNDPFLGVYYHKNNKSWMESEFRVYSSANNCTFEYVSQPFLMDLEGKQGNFKNLREFVFKNIDGYFKIYSKHTPINLVRDLPQGFSALEPLVDLPIGINITRFQTLLALHRSYLTPGDSSSGWTAGAAAYYVGYLQPRTFLLKYNENGTITDAVDCALDPLSETKCTLKSFTVEKGIYQTSNFRVQPTESIVRFPNITNLCPFGEVFNATRFASVYAWNRKRISNCVADYSVLYNSASFSTFKCYGVSPTKLNDLCFTNVYADSFVIRGDEVRQIAPGQTGKIADYNYKLPDDFTGCVIAWNSNNLDSKVGGNYNYLYRLFRKSNLKPFERDISTEIYQAGSTPCNGVEGFNCYFPLQSYGFQPTNGVGYQPYRVVVLSFELLHAPATVCGPKKSTNLVKNKCVNFNFNGLTGTGVLTESNKKFLPFQQFGRDIADTTDAVRDPQTLEILDITPCSFGGVSVITPGTNTSNQVAVLYQDVNCTEVPVAIHADQLTPTWRVYSTGSNVFQTRAGCLIGAEHVNNSYECDIPIGAGICASYQTQTNSPRRARSVASQSIIAYTMSLGAENSVAYSNNSIAIPTNFTISVTTEILPVSMTKTSVDCTMYICGDSTECSNLLLQYGSFCTQLNRALTGIAVEQDKNTQEVFAQVKQIYKTPPIKDFGGFNFSQILPDPSKPSKRSFIEDLLFNKVTLADAGFIKQYGDCLGDIAARDLICAQKFNGLTVLPPLLTDEMIAQYTSALLAGTITSGWTFGAGAALQIPFAMQMAYRFNGIGVTQNVLYENQKLIANQFNSAIGKIQDSLSSTASALGKLQDVVNQNAQALNTLVKQLSSNFGAISSVLNDILSRLDKVEAEVQIDRLITGRLQSLQTYVTQQLIRAAEIRASANLAATKMSECVLGQSKRVDFCGKGYHLMSFPQSAPHGVVFLHVTYVPAQEKNFTTAPAICHDGKAHFPREGVFVSNGTHWFVTQRNFYEPQIITTDNTFVSGNCDVVIGIVNNTVYDPLQPELDSFKEELDKYFKNHTSPDVDLGDISGINASVVNIQKEIDRLNEVAKNLNESLIDLQELGKYEQYIKWPWYIWLGFIAGLIAIVMVTIMLCCMTSCCSCLKGVSGLNNAVQNLQVEIGNNSAGIKGQVVALNTLVNGTNPNGSTVEERGLTNSIKANETNIASVTQEVNTAKGNISSLQGDVQALQEAGYIPEAPRDGQAYVRKDGEWVFLSTFL

SEQ ID NO: 129 - protein, 1286 aa, Artificial Sequence
  Chemically Synthesized
MPMGSLQPLATLYLLGMLVASVLASSQCVNLTTRTQLPPAYTNSFTRGVYYPDKVFRSSVLHSTQDLFLPFFSNVTWFHAIHVSGTNGTKRFDNPVLPFNDGVYFASTEKSNIIRGWIFGTTLDSKTQSLLIVNNATNVVIKVCEFQFCNDPFLGVYYHKNNKSWMESEFRVYSSANNCTFEYVSQPFLMDLEGKQGNFKNLREFVFKNIDGYFKIYSKHTPINLVRDLPQGFSALEPLVDLPIGINITRFQTLLALHRSYLTPGDSSSGWTAGAAAYYVGYLQPRTFLLKYNENGTITDAVDCALDPLSETKCTLKSFTVEKGIYQTSNFRVQPTESIVRFPNITNLCPFGEVFNATRFASVYAWNRKRISNCVADYSVLYNSASFSTFKCYGVSPTKLNDLCFTNVYADSFVIRGDEVRQIAPGQTGKIADYNYKLPDDFTGCVIAWNSNNLDSKVGGNYNYLYRLFRKSNLKPFERDISTEIYQAGSTPCNGVEGFNCYFPLQSYGFQPTNGVGYQPYRVVVLSFELLHAPATVCGPKKSTNLVKNKCVNFNFNGLTGTGVLTESNKKFLPFQQFGRDIADTTDAVRDPQTLEILDITPCSFGGVSVITPGTNTSNQVAVLYQDVNCTEVPVAIHADQLTPTWRVYSTGSNVFQTRAGCLIGAEHVNNSYECDIPIGAGICASYQTQTNSPRRARSVASQSIIAYTMSLGAENSVAYSNNSIAIPTNFTISVTTEILPVSMTKTSVDCTMYICGDSTECSNLLLQYGSFCTQLNRALTGIAVEQDKNTQEVFAQVKQIYKTPPIKDFGGFNFSQILPDPSKPSKRSFIEDLLFNKVTLADAGFIKQYGDCLGDIAARDLICAQKFNGLTVLPPLLTDEMIAQYTSALLAGTITSGWTFGAGAALQIPFAMQMAYRFNGIGVTQNVLYENQKLIANQFNSAIGKIQDSLSSTASALGKLQDVVNQNAQALNTLVKQLSSNFGAISSVLNDILSRLDKVEAEVQIDRLITGRLQSLQTYVTQQLIRAAEIRASANLAATKMSECVLGQSKRVDFCGKGYHLMSFPQSAPHGVVFLHVTYVPAQEKNFTTAPAICHDGKAHFPREGVFVSNGTHWFVTQRNFYEPQIITTDNTFVSGNCDVVIGIVNNTVYDPLQPELDSFKEELDKYFKNHTSPDVDLGDISGINASVVNIQKEIDRLNEVAKNLNESLIDLQELGKYEQYIKWPWYIWLGFIAGLIAIVMVTIMLCCMTSCCSCLKGGYIPEAPRDGQAYVRKDGEWVFLSTFL

SEQ ID NO: 130 - protein, 511 aa, Artificial Sequence
  Chemically Synthesized
MKCLLYLAFLFIGVNCKFTIVFPHNQKGNWKNVPSNYHYCPSSSDLNWHNDLIGTALQVKMPKSHKAIQADGWMCHASKWVTTCDFRWYGPKYITHSIRSFTPSVEQCKESIEQTKQGTWLNPGFPPQSCGYATVTDAEAVIVQVTPHHVLVDEYTGEWVDSQFINGKCSNYICPTVHNSTTWHSDYKVKGLCDSNLISMDITFFSEDGELSSLGKEGTGFRSNYFAYETGGKACKMQYCKHWGVRLPSGVWFEMADKDLFAAARFPECPEGSSISAPSQTSVDVSLIQDVERILDYSLCQETWSKIRAGLPISPVDLSYLAPKNPGTGPAFTIINGTLKYFETRYIRVDIAAPILSRMVGMISGTTTERELWDDWAPYEDVEIGPNGVLRTSSGYKFPLYMIGHGMLDSDLHLSSKAQVFEHPHIQDAASQLPDDESLFFGDTGLSKNPIELVEGWFSSWKSSIASFFFIIGLIIGLFLVLRVGIHLCIKLKHTKKRQIYTDIEMNRLGK

SEQ ID NO: 131 - protein, 607 aa, Artificial Sequence
  Chemically Synthesized
MEDAKNIKKGPAPFYPLEDGTAGEQLHKAMKRYALVPGTIAFTDAHIEVDITYAEYFEMSVRLAEAMKRYGLNTNHRIVVCSENSLQFFMPVLGALFIGVAVAPANDIYNERELLNSMGISQPTVVFVSKKGLQKILNVQKKLPIIQKIIIMDSKTDYQGFQSMYTFVTSHLPPGFNEYDFVPESFDRDKTIALIMNSSGSTGLPKGVALPHRTACVRFSHARDPIFGNQIIPDTAILSVVPFHHGFGMFTTLGYLICGFRVVLMYRFEEELFLRSLQDYKIQSALLVPTLFSFFAKSTLIDKYDLSNLHEIASGGAPLSKEVGEAVAKRFHLPGIRQGYGLTETTSAILITPEGDDKPGAVGKVVPFFEAKVVDLDTGKTLGVNQRGELCVRGPMIMSGYVNNPEATNALIDKDGWLHSGDIAYWDEDEHFFIVDRLKSLIKYKGYQVAPAELESILLQHPNIFDAGVAGLPDDDAGELPAAVVVLEHGKTMTEKEIVDYVASQVTTAKKLRGGVVFVDEVPKGLTGKLDARKIREILIKAKKGGKIAVACKNWFSSLSHFVIHLNSHGFPPEVEEQAAGTLPMSCAQESGMDRHPAACASARINV

SEQ ID NO: 132 - DNA, 3267 bp, Artificial Sequence
  Chemically Synthesized
aacatccccgctctggtggaaaaccagaagaagtactttggcacctacagcgtgatggccatgctgaacgctcagaccgtgctggaccacatccagaaggtggccgatattgagggcgagcagaacgagaacaacgagaatctgtggtttcaccccgtgatgagccacctgtacaacgccaagaacggctacgacaagcagcccgagaaaaccatgttcatcatcgagcggctgcagagctacttcccattcctgaagatcatggccgagaaccagagagagtacagcaacggcaagtacaagcagaaccgcgtggaagtgaacagcaacgacatcttcgaggtgctgaagcgcgccttcggcgtgctgaagatgtacagggacctgaccaaccactacaagacctacgaggaaaagctgaacgacggctgcgagttcctgaccagcacagagcaacctctgagcggcatgatcaacaactactacacagtggccctgcggaacatgaacgagagatacggctacaagacagaggacctggccttcatccaggacaagcggttcaagttcgtgaaggacgcctacggcaagaaaaagtcccaagtgaataccggattcttcctgagcctgcaggactacaacggcgacacacagaagaagctgcacctgagcggagtgggaatcgccctgctgatctgcctgttcctggacaagcagtacatcaacatctttctgagcaggctgcccatcttctccagctacaatgcccagagcgaggaacggcggatcatcatcagatccttcggcatcaacagcatcaagctgcccaaggaccggatccacagcgagaagtccaacaagagcgtggccatggatatgctcaacgaagtgaagcggtgccccgacgagctgttcacaacactgtctgccgagaagcagtcccggttcagaatcatcagcgacgaccacaatgaagtgctgatgaagcggagcagcgacagattcgtgcctctgctgctgcagtatatcgattacggcaagctgttcgaccacatcaggttccacgtgaacatgggcaagctgagatacctgctgaaggccgacaagacctgcatcgacggccagaccagagtcagagtgatcgagcagcccctgaacggcttcggcagactggaagaggccgagacaatgcggaagcaagagaacggcaccttcggcaacagcggcatccggatcagagacttcgagaacatgaagcgggacgacgccaatcctgccaactatccctacatcgtggacacctacacacactacatcctggaaaacaacaaggtcgagatgtttatcaacgacaaagaggacagcgccccactgctgcccgtgatcgaggatgatagatacgtggtcaagacaatccccagctgccggatgagcaccctggaaattccagccatggccttccacatgtttctgttcggcagcaagaaaaccgagaagctgatcgtggacgtgcacaaccggtacaagagactgttccaggccatgcagaaagaagaagtgaccgccgagaatatcgccagcttcggaatcgccgagagcgacctgcctcagaagatcctggatctgatcagcggcaatgcccacggcaaggatgtggacgccttcatcagactgaccgtggacgacatgctgaccgacaccgagcggagaatcaagagattcaaggacgaccggaagtccattcggagcgccgacaacaagatgggaaagagaggcttcaagcagatctccacaggcaagctggccgacttcctggccaaggacatcgtgctgtttcagcccagcgtgaacgatggcgagaacaagatcaccggcctgaactaccggatcatgcagagcgccattgccgtgtacgatagcggcgacgattacgaggccaagcagcagttcaagctgatgttcgagaaggcccggctgatcggcaagggcacaacagagcctcatccatttctgtacaaggtgttcgcccgcagcatccccgccaatgccgtcgagttctacgagcgctacctgatcgagcggaagttctacctgaccggcctgtccaacgagatcaagaaaggcaacagagtggatgtgcccttcatccggcgggaccagaacaagtggaaaacacccgccatgaagaccctgggcagaatctacagcgaggatctgcccgtggaactgcccagacagatgttcgacaatgagatcaagtcccacctgaagtccctgccacagatggaaggcatcgacttcaacaatgccaacgtgacctatctgatcgccgagtacatgaagagagtgctggacgacgacttccagaccttctaccagtggaaccgcaactaccggtacatggacatgcttaagggcgagtacgacagaaagggctccctgcagcactgcttcaccagcgtggaagagagagaaggcctctggaaagagcgggcctccagaacagagcggtacagaaagcaggccagcaacaagatccgcagcaaccggcagatgagaaacgccagcagcgaagagatcgagacaatcctggataagcggctgagcaacagccggaacgagtaccagaaaagcgagaaagtgatccggcgctacagagtgcaggatgccctgctgtttctgctggccaaaaagaccctgaccgaactggccgatttcgacggcgagaggttcaaactgaaagaaatcatgcccgacgccgagaagggaatcctgagcgagatcatgcccatgagcttcaccttcgagaaaggcggcaagaagtacaccatcaccagcgagggcatgaagctgaagaactacggcgacttctttgtgctggctagcgacaagaggatcggcaacctgctggaactcgtgggcagcgacatcgtgtccaaagaggatatcatggaagagttcaacaaatacgaccagtgcaggcccgagatcagctccatcgtgttcaacctggaaaagtgggccttcgacacataccccgagctgtctgccagagtggaccgggaagagaaggtggacttcaagagcatcctgaaaatcctgctgaacaacaagaacatcaacaaagagcagagcgacatcctgcggaagatccggaacgccttcgatcacaacaattaccccgacaaaggcgtggtggaaatcaaggccctgcctgagatcgccatgagcatcaagaaggcctttggggagtacgccatcatgaag

SEQ ID NO: 133 - DNA, 2946 bp, Artificial Sequence
  Chemically Synthesized
aacatccccgctctggtggaaaaccagaagaagtactttggcacctacagcgtgatggccatgctgaacgctcagaccgtgctggaccacatccagaaggtggccgatattgagggcgagcagaacgagaacaacgagaatctgtggtttcaccccgtgatgagccacctgtacaacgccaagaacggctacgacaagcagcccgagaaaaccatgttcatcatcgagcggctgcagagctacttcccattcctgaagatcatggccgagaaccagagagagtacagcaacggcaagtacaagcagaaccgcgtggaagtgaacagcaacgacatcttcgaggtgctgaagcgcgccttcggcgtgctgaagatgtacagggacctgaccaaccactacaagacctacgaggaaaagctgaacgacggctgcgagttcctgaccagcacagagcaacctctgagcggcatgatcaacaactactacacagtggccctgcggaacatgaacgagagatacggctacaagacagaggacctggccttcatccaggacaagcggttcaagttcgtgaaggacgcctacggcaagaaaaagtcccaagtgaataccggattcttcctgagcctgcaggactacaacggcgacacacagaagaagctgcacctgagcggagtgggaatcgccctgctgatctgcctgttcctggacaagcagtacatcaacatctttctgagcaggctgcccatcttctccagctacaatgcccagagcgaggaacggcggatcatcatcagatccttcggcatcaacagcatcaagctgcccaaggaccggatccacagcgagaagtccaacaagagcgtggccatggatatgctcaacgaagtgaagcggtgccccgacgagctgttcacaacactgtctgccgagaagcagtcccggttcagaatcatcagcgacgaccacaatgaagtgctgatgaagcggagcagcgacagattcgtgcctctgctgctgcagtatatcgattacggcaagctgttcgaccacatcaggttccacgtgaacatgggcaagctgagatacctgctgaaggccgacaagacctgcatcgacggccagaccagagtcagagtgatcgagcagcccctgaacggcttcggcagactggaagaggccgagacaatgcggaagcaagagaacggcaccttcggcaacagcggcatccggatcagagacttcgagaacatgaagcgggacgacgccaatcctgccaactatccctacatcgtggacacctacacacactacatcctggaaaacaacaaggtcgagatgtttatcaacgacaaagaggacagcgccccactgctgcccgtgatcgaggatgatagatacgtggtcaagacaatccccagctgccggatgagcaccctggaaattccagccatggccttccacatgtttctgttcggcagcaagaaaaccgagaagctgatcgtggacgtgcacaaccggtacaagagactgttccaggccatgcagaaagaagaagtgaccgccgagaatatcgccagcttcggaatcgccgagagcgacctgcctcagaagatcctggatctgatcagcggcaatgcccacggcaaggatgtggacgccttcatcagactgaccgtggacgacatgctgaccgacaccgagcggagaatcaagagattcaaggacgaccggaagtccattcggagcgccgacaacaagatgggaaagagaggcttcaagcagatctccacaggcaagctggccgacttcctggccaaggacatcgtgctgtttcagcccagcgtgaacgatggcgagaacaagatcaccggcctgaactaccggatcatgcagagcgccattgccgtgtacgatagcggcgacgattacgaggccaagcagcagttcaagctgatgttcgagaaggcccggctgatcggcaagggcacaacagagcctcatccatttctgtacaaggtgttcgcccgcagcatccccgccaatgccgtcgagttctacgagcgctacctgatcgagcggaagttctacctgaccggcctgtccaacgagatcaagaaaggcaacagagtggatgtgcccttcatccggcgggaccagaacaagtggaaaacacccgccatgaagaccctgggcagaatctacagcgaggatctgcccgtggaactgcccagacagatgttcgacaatgagatcaagtcccacctgaagtccctgccacagatggaaggcatcgacttcaacaatgccaacgtgacctatctgatcgccgagtacatgaagagagtgctggacgacgacttccagaccttctaccagtggaaccgcaactaccggtacatggacatgcttaagggcgagtacgacagaaagggctccctgcagcactgcttcaccagcgtggaagagagagaaggcctctggaaagagcgggcctccagaacagagcggtacagaaagcaggccagcaacaagatccgcagcaaccggcagatgagaaacgccagcagcgaagagatcgagacaatcctggataagcggctgagcaacagccggaacgagtaccagaaaagcgagaaagtgatccggcgctacagagtgcaggatgccctgctgtttctgctggccaaaaagaccctgaccgaactggccgatttcgacggcgagaggttcaaactgaaagaaatcatgcccgacgccgagaagggaatcctgagcgagatcatgcccatgagcttcaccttcgagaaaggcggcaagaagtacaccatcaccagcgagggcatgaagctgaagaactacggcgacttctttgtgctggctagcgacaagaggatcggcaacctgctggaactcgtgggcagcgacatcgtgtccaaagaggat

SEQ ID NO: 134 - DNA, 3267 bp, Artificial Sequence
  Chemically Synthesized
aacatccccgctctggtggaaaaccagaagaagtactttggcacctacagcgtgatggccatgctgaacgctcagaccgtgctggaccacatccagaaggtggccgatattgagggcgagcagaacgagaacaacgagaatctgtggtttcaccccgtgatgagccacctgtacaacgccaagaacggctacgacaagcagcccgagaaaaccatgttcatcatcgagcggctgcagagctacttcccattcctgaagatcatggccgagaaccagagagagtacagcaacggcaagtacaagcagaaccgcgtggaagtgaacagcaacgacatcttcgaggtgctgaagcgcgccttcggcgtgctgaagatgtacagggacctgaccaacgcatacaagacctacgaggaaaagctgaacgacggctgcgagttcctgaccagcacagagcaacctctgagcggcatgatcaacaactactacacagtggccctgcggaacatgaacgagagatacggctacaagacagaggacctggccttcatccaggacaagcggttcaagttcgtgaaggacgcctacggcaagaaaaagtcccaagtgaataccggattcttcctgagcctgcaggactacaacggcgacacacagaagaagctgcacctgagcggagtgggaatcgccctgctgatctgcctgttcctggacaagcagtacatcaacatctttctgagcaggctgcccatcttctccagctacaatgcccagagcgaggaacggcggatcatcatcagatccttcggcatcaacagcatcaagctgcccaaggaccggatccacagcgagaagtccaacaagagcgtggccatggatatgctcaacgaagtgaagcggtgccccgacgagctgttcacaacactgtctgccgagaagcagtcccggttcagaatcatcagcgacgaccacaatgaagtgctgatgaagcggagcagcgacagattcgtgcctctgctgctgcagtatatcgattacggcaagctgttcgaccacatcaggttccacgtgaacatgggcaagctgagatacctgctgaaggccgacaagacctgcatcgacggccagaccagagtcagagtgatcgagcagcccctgaacggcttcggcagactggaagaggccgagacaatgcggaagcaagagaacggcaccttcggcaacagcggcatccggatcagagacttcgagaacatgaagcgggacgacgccaatcctgccaactatccctacatcgtggacacctacacacactacatcctggaaaacaacaaggtcgagatgtttatcaacgacaaagaggacagcgccccactgctgcccgtgatcgaggatgatagatacgtggtcaagacaatccccagctgccggatgagcaccctggaaattccagccatggccttccacatgtttctgttcggcagcaagaaaaccgagaagctgatcgtggacgtgcacaaccggtacaagagactgttccaggccatgcagaaagaagaagtgaccgccgagaatatcgccagcttcggaatcgccgagagcgacctgcctcagaagatcctggatctgatcagcggcaatgcccacggcaaggatgtggacgccttcatcagactgaccgtggacgacatgctgaccgacaccgagcggagaatcaagagattcaaggacgaccggaagtccattcggagcgccgacaacaagatgggaaagagaggcttcaagcagatctccacaggcaagctggccgacttcctggccaaggacatcgtgctgtttcagcccagcgtgaacgatggcgagaacaagatcaccggcctgaactaccggatcatgcagagcgccattgccgtgtacgatagcggcgacgattacgaggccaagcagcagttcaagctgatgttcgagaaggcccggctgatcggcaagggcacaacagagcctcatccatttctgtacaaggtgttcgcccgcagcatccccgccaatgccgtcgagttctacgagcgctacctgatcgagcggaagttctacctgaccggcctgtccaacgagatcaagaaaggcaacagagtggatgtgcccttcatccggcgggaccagaacaagtggaaaacacccgccatgaagaccctgggcagaatctacagcgaggatctgcccgtggaactgcccagacagatgttcgacaatgagatcaagtcccacctgaagtccctgccacagatggaaggcatcgacttcaacaatgccaacgtgacctatctgatcgccgagtacatgaagagagtgctggacgacgacttccagaccttctaccagtggaaccgcaactaccggtacatggacatgcttaagggcgagtacgacagaaagggctccctgcagcactgcttcaccagcgtggaagagagagaaggcctctggaaagagcgggcctccagaacagagcggtacagaaagcaggccagcaacaagatccgcagcaaccggcagatgagaaacgccagcagcgaagagatcgagacaatcctggataagcggctgagcaacagccggaacgagtaccagaaaagcgagaaagtgatccggcgctacagagtgcaggatgccctgctgtttctgctggccaaaaagaccctgaccgaactggccgatttcgacggcgagaggttcaaactgaaagaaatcatgcccgacgccgagaagggaatcctgagcgagatcatgcccatgagcttcaccttcgagaaaggcggcaagaagtacaccatcaccagcgagggcatgaagctgaagaactacggcgacttctttgtgctggctagcgacaagaggatcggcaacctgctggaactcgtgggcagcgacatcgtgtccaaagaggatatcatggaagagttcaacaaatacgaccagtgcaggcccgagatcagctccatcgtgttcaacctggaaaagtgggccttcgacacataccccgagctgtctgccagagtggaccgggaagagaaggtggacttcaagagcatcctgaaaatcctgctgaacaacaagaacatcaacaaagagcagagcgacatcctgcggaagatccggaacgccttcgatgcaaacaattaccccgacaaaggcgtggtggaaatcaaggccctgcctgagatcgccatgagcatcaagaaggcctttggggagtacgccatcatgaag

SEQ ID NO: 135 - DNA, 2946 bp, Artificial Sequence
  Chemically Synthesized
aacatccccgctctggtggaaaaccagaagaagtactttggcacctacagcgtgatggccatgctgaacgctcagaccgtgctggaccacatccagaaggtggccgatattgagggcgagcagaacgagaacaacgagaatctgtggtttcaccccgtgatgagccacctgtacaacgccaagaacggctacgacaagcagcccgagaaaaccatgttcatcatcgagcggctgcagagctacttcccattcctgaagatcatggccgagaaccagagagagtacagcaacggcaagtacaagcagaaccgcgtggaagtgaacagcaacgacatcttcgaggtgctgaagcgcgccttcggcgtgctgaagatgtacagggacctgaccaacgcatacaagacctacgaggaaaagctgaacgacggctgcgagttcctgaccagcacagagcaacctctgagcggcatgatcaacaactactacacagtggccctgcggaacatgaacgagagatacggctacaagacagaggacctggccttcatccaggacaagcggttcaagttcgtgaaggacgcctacggcaagaaaaagtcccaagtgaataccggattcttcctgagcctgcaggactacaacggcgacacacagaagaagctgcacctgagcggagtgggaatcgccctgctgatctgcctgttcctggacaagcagtacatcaacatctttctgagcaggctgcccatcttctccagctacaatgcccagagcgaggaacggcggatcatcatcagatccttcggcatcaacagcatcaagctgcccaaggaccggatccacagcgagaagtccaacaagagcgtggccatggatatgctcaacgaagtgaagcggtgccccgacgagctgttcacaacactgtctgccgagaagcagtcccggttcagaatcatcagcgacgaccacaatgaagtgctgatgaagcggagcagcgacagattcgtgcctctgctgctgcagtatatcgattacggcaagctgttcgaccacatcaggttccacgtgaacatgggcaagctgagatacctgctgaaggccgacaagacctgcatcgacggccagaccagagtcagagtgatcgagcagcccctgaacggcttcggcagactggaagaggccgagacaatgcggaagcaagagaacggcaccttcggcaacagcggcatccggatcagagacttcgagaacatgaagcgggacgacgccaatcctgccaactatccctacatcgtggacacctacacacactacatcctggaaaacaacaaggtcgagatgtttatcaacgacaaagaggacagcgccccactgctgcccgtgatcgaggatgatagatacgtggtcaagacaatccccagctgccggatgagcaccctggaaattccagccatggccttccacatgtttctgttcggcagcaagaaaaccgagaagctgatcgtggacgtgcacaaccggtacaagagactgttccaggccatgcagaaagaagaagtgaccgccgagaatatcgccagcttcggaatcgccgagagcgacctgcctcagaagatcctggatctgatcagcggcaatgcccacggcaaggatgtggacgccttcatcagactgaccgtggacgacatgctgaccgacaccgagcggagaatcaagagattcaaggacgaccggaagtccattcggagcgccgacaacaagatgggaaagagaggcttcaagcagatctccacaggcaagctggccgacttcctggccaaggacatcgtgctgtttcagcccagcgtgaacgatggcgagaacaagatcaccggcctgaactaccggatcatgcagagcgccattgccgtgtacgatagcggcgacgattacgaggccaagcagcagttcaagctgatgttcgagaaggcccggctgatcggcaagggcacaacagagcctcatccatttctgtacaaggtgttcgcccgcagcatccccgccaatgccgtcgagttctacgagcgctacctgatcgagcggaagttctacctgaccggcctgtccaacgagatcaagaaaggcaacagagtggatgtgcccttcatccggcgggaccagaacaagtggaaaacacccgccatgaagaccctgggcagaatctacagcgaggatctgcccgtggaactgcccagacagatgttcgacaatgagatcaagtcccacctgaagtccctgccacagatggaaggcatcgacttcaacaatgccaacgtgacctatctgatcgccgagtacatgaagagagtgctggacgacgacttccagaccttctaccagtggaaccgcaactaccggtacatggacatgcttaagggcgagtacgacagaaagggctccctgcagcactgcttcaccagcgtggaagagagagaaggcctctggaaagagcgggcctccagaacagagcggtacagaaagcaggccagcaacaagatccgcagcaaccggcagatgagaaacgccagcagcgaagagatcgagacaatcctggataagcggctgagcaacagccggaacgagtaccagaaaagcgagaaagtgatccggcgctacagagtgcaggatgccctgctgtttctgctggccaaaaagaccctgaccgaactggccgatttcgacggcgagaggttcaaactgaaagaaatcatgcccgacgccgagaagggaatcctgagcgagatcatgcccatgagcttcaccttcgagaaaggcggcaagaagtacaccatcaccagcgagggcatgaagctgaagaactacggcgacttctttgtgctggctagcgacaagaggatcggcaacctgctggaactcgtgggcagcgacatcgtgtccaaagaggat

SEQ ID NO: 136 - DNA, 117 bp, Artificial Sequence
  Chemically Synthesized
aactcaaagaaaaggtcactggaggacaacgaaacggaaatcaaagtctccagagacacctggaacactaagaacatgcggtccctggaaccgccacgaagcaagaaacggatacat

SEQ ID NO: 137 - DNA, 33 bp, Artificial Sequence
  Chemically Synthesized
cttcaactgcctccacttgaaagactgacactg

SEQ ID NO: 138 - DNA, 48 bp, Artificial Sequence
  Chemically Synthesized
ggatcccttcaactgcctccacttgaaagactgacactgggtagttcc

SEQ ID NO: 139 - DNA, 96 bp, Artificial Sequence
  Chemically Synthesized
atgagtgtgttgacgccgttgcttctgcgagggcttaccgggtctgctagaagacttccggtccccagggccaagatacatagcctcggagacccg

SEQ ID NO: 140 - DNA, 390 bp, Artificial Sequence
  Chemically Synthesized
atgagtgtgttgacgccgttgcttctgcgagggcttaccgggtctgctagaagacttccggtccccagggccaagatacatagcctcggagacccgatgtctgtgctcactcctctgcttttgcgaggactgactgggtccgccagacgactcccggtgccgagagctaaaatccatagcctgggaaaattggcaactatgtcagtcctgacgccgcttcttctccggggtcttacagggtctgcaagaaggctgcctgtacctcgggcgaaaattcatagcttgggcgacccgatgagtgtattgacgcccctgttgctgagaggattgactgggtcagcgcgccggctccctgtcccccgagctaagattcactcccttggtaagctg

SEQ ID NO: 141 - DNA, 60 bp, Artificial Sequence
  Chemically Synthesized
atgtacaggatgcaactcctgtcttgcattgcactaagtcttgcacttgtcacgaattcc

SEQ ID NO: 142 - DNA, 129 bp, Artificial Sequence
  Chemically Synthesized
atgggttgttgtttcagcaagacagcggcgaaaggtgaagcagcagcagaaagaccaggcgaggctgcggtagcatcaagtccctccaaggctaatgggcaggaaaacggacacgtcaaagttggaagc

SEQ ID NO: 143 - DNA, 51 bp, Artificial Sequence
  Chemically Synthesized
atgctgctgcccgtccccctgctgctgggcctgctgggcgccgccgccgac

SEQ ID NO: 144 - DNA, 30 bp, Artificial Sequence
  Chemically Synthesized
gggatcactctcggcaaggacgagctgtaa

SEQ ID NO: 145 - DNA, 12 bp, Artificial Sequence
  Chemically Synthesized
tccaaattataa

SEQ ID NO: 146 - DNA, 66 bp, Artificial Sequence
  Chemically Synthesized
gactacaaagaccatgacggtgattataaagatcatgacatcgattacaaggatgacgatgacaag

SEQ ID NO: 147 - DNA, 3471 bp, Artificial Sequence
  Chemically Synthesized
atggactacaaagaccatgacggtgattataaagatcatgacatcgattacaaggatgacgatgacaagggcggaaactcaaagaaaaggtcactggaggacaacgaaacggaaatcaaagtctccagagacacctggaacactaagaacatgcggtccctggaaccgccacgaagcaagaaacggatacatggaggcaacatccccgctctggtggaaaaccagaagaagtactttggcacctacagcgtgatggccatgctgaacgctcagaccgtgctggaccacatccagaaggtggccgatattgagggcgagcagaacgagaacaacgagaatctgtggtttcaccccgtgatgagccacctgtacaacgccaagaacggctacgacaagcagcccgagaaaaccatgttcatcatcgagcggctgcagagctacttcccattcctgaagatcatggccgagaaccagagagagtacagcaacggcaagtacaagcagaaccgcgtggaagtgaacagcaacgacatcttcgaggtgctgaagcgcgccttcggcgtgctgaagatgtacagggacctgaccaaccactacaagacctacgaggaaaagctgaacgacggctgcgagttcctgaccagcacagagcaacctctgagcggcatgatcaacaactactacacagtggccctgcggaacatgaacgagagatacggctacaagacagaggacctggccttcatccaggacaagcggttcaagttcgtgaaggacgcctacggcaagaaaaagtcccaagtgaataccggattcttcctgagcctgcaggactacaacggcgacacacagaagaagctgcacctgagcggagtgggaatcgccctgctgatctgcctgttcctggacaagcagtacatcaacatctttctgagcaggctgcccatcttctccagctacaatgcccagagcgaggaacggcggatcatcatcagatccttcggcatcaacagcatcaagctgcccaaggaccggatccacagcgagaagtccaacaagagcgtggccatggatatgctcaacgaagtgaagcggtgccccgacgagctgttcacaacactgtctgccgagaagcagtcccggttcagaatcatcagcgacgaccacaatgaagtgctgatgaagcggagcagcgacagattcgtgcctctgctgctgcagtatatcgattacggcaagctgttcgaccacatcaggttccacgtgaacatgggcaagctgagatacctgctgaaggccgacaagacctgcatcgacggccagaccagagtcagagtgatcgagcagcccctgaacggcttcggcagactggaagaggccgagacaatgcggaagcaagagaacggcaccttcggcaacagcggcatccggatcagagacttcgagaacatgaagcgggacgacgccaatcctgccaactatccctacatcgtggacacctacacacactacatcctggaaaacaacaaggtcgagatgtttatcaacgacaaagaggacagcgccccactgctgcccgtgatcgaggatgatagatacgtggtcaagacaatccccagctgccggatgagcaccctggaaattccagccatggccttccacatgtttctgttcggcagcaagaaaaccgagaagctgatcgtggacgtgcacaaccggtacaagagactgttccaggccatgcagaaagaagaagtgaccgccgagaatatcgccagcttcggaatcgccgagagcgacctgcctcagaagatcctggatctgatcagcggcaatgcccacggcaaggatgtggacgccttcatcagactgaccgtggacgacatgctgaccgacaccgagcggagaatcaagagattcaaggacgaccggaagtccattcggagcgccgacaacaagatgggaaagagaggcttcaagcagatctccacaggcaagctggccgacttcctggccaaggacatcgtgctgtttcagcccagcgtgaacgatggcgagaacaagatcaccggcctgaactaccggatcatgcagagcgccattgccgtgtacgatagcggcgacgattacgaggccaagcagcagttcaagctgatgttcgagaaggcccggctgatcggcaagggcacaacagagcctcatccatttctgtacaaggtgttcgcccgcagcatccccgccaatgccgtcgagttctacgagcgctacctgatcgagcggaagttctacctgaccggcctgtccaacgagatcaagaaaggcaacagagtggatgtgcccttcatccggcgggaccagaacaagtggaaaacacccgccatgaagaccctgggcagaatctacagcgaggatctgcccgtggaactgcccagacagatgttcgacaatgagatcaagtcccacctgaagtccctgccacagatggaaggcatcgacttcaacaatgccaacgtgacctatctgatcgccgagtacatgaagagagtgctggacgacgacttccagaccttctaccagtggaaccgcaactaccggtacatggacatgcttaagggcgagtacgacagaaagggctccctgcagcactgcttcaccagcgtggaagagagagaaggcctctggaaagagcgggcctccagaacagagcggtacagaaagcaggccagcaacaagatccgcagcaaccggcagatgagaaacgccagcagcgaagagatcgagacaatcctggataagcggctgagcaacagccggaacgagtaccagaaaagcgagaaagtgatccggcgctacagagtgcaggatgccctgctgtttctgctggccaaaaagaccctgaccgaactggccgatttcgacggcgagaggttcaaactgaaagaaatcatgcccgacgccgagaagggaatcctgagcgagatcatgcccatgagcttcaccttcgagaaaggcggcaagaagtacaccatcaccagcgagggcatgaagctgaagaactacggcgacttctttgtgctggctagcgacaagaggatcggcaacctgctggaactcgtgggcagcgacatcgtgtccaaagaggatatcatggaagagttcaacaaatacgaccagtgcaggcccgagatcagctccatcgtgttcaacctggaaaagtgggccttcgacacataccccgagctgtctgccagagtggaccgggaagagaaggtggacttcaagagcatcctgaaaatcctgctgaacaacaagaacatcaacaaagagcagagcgacatcctgcggaagatccggaacgccttcgatcacaacaattaccccgacaaaggcgtggtggaaatcaaggccctgcctgagatcgccatgagcatcaagaaggcctttggggagtacgccatcatgaagtagtaa

SEQ ID NO: 148 - DNA, 3387 bp, Artificial Sequence
  Chemically Synthesized
atggactacaaagaccatgacggtgattataaagatcatgacatcgattacaaggatgacgatgacaagggcggacttcaactgcctccacttgaaagactgacactgggaggcaacatccccgctctggtggaaaaccagaagaagtactttggcacctacagcgtgatggccatgctgaacgctcagaccgtgctggaccacatccagaaggtggccgatattgagggcgagcagaacgagaacaacgagaatctgtggtttcaccccgtgatgagccacctgtacaacgccaagaacggctacgacaagcagcccgagaaaaccatgttcatcatcgagcggctgcagagctacttcccattcctgaagatcatggccgagaaccagagagagtacagcaacggcaagtacaagcagaaccgcgtggaagtgaacagcaacgacatcttcgaggtgctgaagcgcgccttcggcgtgctgaagatgtacagggacctgaccaaccactacaagacctacgaggaaaagctgaacgacggctgcgagttcctgaccagcacagagcaacctctgagcggcatgatcaacaactactacacagtggccctgcggaacatgaacgagagatacggctacaagacagaggacctggccttcatccaggacaagcggttcaagttcgtgaaggacgcctacggcaagaaaaagtcccaagtgaataccggattcttcctgagcctgcaggactacaacggcgacacacagaagaagctgcacctgagcggagtgggaatcgccctgctgatctgcctgttcctggacaagcagtacatcaacatctttctgagcaggctgcccatcttctccagctacaatgcccagagcgaggaacggcggatcatcatcagatccttcggcatcaacagcatcaagctgcccaaggaccggatccacagcgagaagtccaacaagagcgtggccatggatatgctcaacgaagtgaagcggtgccccgacgagctgttcacaacactgtctgccgagaagcagtcccggttcagaatcatcagcgacgaccacaatgaagtgctgatgaagcggagcagcgacagattcgtgcctctgctgctgcagtatatcgattacggcaagctgttcgaccacatcaggttccacgtgaacatgggcaagctgagatacctgctgaaggccgacaagacctgcatcgacggccagaccagagtcagagtgatcgagcagcccctgaacggcttcggcagactggaagaggccgagacaatgcggaagcaagagaacggcaccttcggcaacagcggcatccggatcagagacttcgagaacatgaagcgggacgacgccaatcctgccaactatccctacatcgtggacacctacacacactacatcctggaaaacaacaaggtcgagatgtttatcaacgacaaagaggacagcgccccactgctgcccgtgatcgaggatgatagatacgtggtcaagacaatccccagctgccggatgagcaccctggaaattccagccatggccttccacatgtttctgttcggcagcaagaaaaccgagaagctgatcgtggacgtgcacaaccggtacaagagactgttccaggccatgcagaaagaagaagtgaccgccgagaatatcgccagcttcggaatcgccgagagcgacctgcctcagaagatcctggatctgatcagcggcaatgcccacggcaaggatgtggacgccttcatcagactgaccgtggacgacatgctgaccgacaccgagcggagaatcaagagattcaaggacgaccggaagtccattcggagcgccgacaacaagatgggaaagagaggcttcaagcagatctccacaggcaagctggccgacttcctggccaaggacatcgtgctgtttcagcccagcgtgaacgatggcgagaacaagatcaccggcctgaactaccggatcatgcagagcgccattgccgtgtacgatagcggcgacgattacgaggccaagcagcagttcaagctgatgttcgagaaggcccggctgatcggcaagggcacaacagagcctcatccatttctgtacaaggtgttcgcccgcagcatccccgccaatgccgtcgagttctacgagcgctacctgatcgagcggaagttctacctgaccggcctgtccaacgagatcaagaaaggcaacagagtggatgtgcccttcatccggcgggaccagaacaagtggaaaacacccgccatgaagaccctgggcagaatctacagcgaggatctgcccgtggaactgcccagacagatgttcgacaatgagatcaagtcccacctgaagtccctgccacagatggaaggcatcgacttcaacaatgccaacgtgacctatctgatcgccgagtacatgaagagagtgctggacgacgacttccagaccttctaccagtggaaccgcaactaccggtacatggacatgcttaagggcgagtacgacagaaagggctccctgcagcactgcttcaccagcgtggaagagagagaaggcctctggaaagagcgggcctccagaacagagcggtacagaaagcaggccagcaacaagatccgcagcaaccggcagatgagaaacgccagcagcgaagagatcgagacaatcctggataagcggctgagcaacagccggaacgagtaccagaaaagcgagaaagtgatccggcgctacagagtgcaggatgccctgctgtttctgctggccaaaaagaccctgaccgaactggccgatttcgacggcgagaggttcaaactgaaagaaatcatgcccgacgccgagaagggaatcctgagcgagatcatgcccatgagcttcaccttcgagaaaggcggcaagaagtacaccatcaccagcgagggcatgaagctgaagaactacggcgacttctttgtgctggctagcgacaagaggatcggcaacctgctggaactcgtgggcagcgacatcgtgtccaaagaggatatcatggaagagttcaacaaatacgaccagtgcaggcccgagatcagctccatcgtgttcaacctggaaaagtgggccttcgacacataccccgagctgtctgccagagtggaccgggaagagaaggtggacttcaagagcatcctgaaaatcctgctgaacaacaagaacatcaacaaagagcagagcgacatcctgcggaagatccggaacgccttcgatcacaacaattaccccgacaaaggcgtggtggaaatcaaggccctgcctgagatcgccatgagcatcaagaaggcctttggggagtacgccatcatgaagtagtaa

SEQ ID NO: 149 - DNA, 3402 bp, Artificial Sequence
  Chemically Synthesized
atggactacaaagaccatgacggtgattataaagatcatgacatcgattacaaggatgacgatgacaagggcggaggatcccttcaactgcctccacttgaaagactgacactgggtagttccggaggcaacatccccgctctggtggaaaaccagaagaagtactttggcacctacagcgtgatggccatgctgaacgctcagaccgtgctggaccacatccagaaggtggccgatattgagggcgagcagaacgagaacaacgagaatctgtggtttcaccccgtgatgagccacctgtacaacgccaagaacggctacgacaagcagcccgagaaaaccatgttcatcatcgagcggctgcagagctacttcccattcctgaagatcatggccgagaaccagagagagtacagcaacggcaagtacaagcagaaccgcgtggaagtgaacagcaacgacatcttcgaggtgctgaagcgcgccttcggcgtgctgaagatgtacagggacctgaccaaccactacaagacctacgaggaaaagctgaacgacggctgcgagttcctgaccagcacagagcaacctctgagcggcatgatcaacaactactacacagtggccctgcggaacatgaacgagagatacggctacaagacagaggacctggccttcatccaggacaagcggttcaagttcgtgaaggacgcctacggcaagaaaaagtcccaagtgaataccggattcttcctgagcctgcaggactacaacggcgacacacagaagaagctgcacctgagcggagtgggaatcgccctgctgatctgcctgttcctggacaagcagtacatcaacatctttctgagcaggctgcccatcttctccagctacaatgcccagagcgaggaacggcggatcatcatcagatccttcggcatcaacagcatcaagctgcccaaggaccggatccacagcgagaagtccaacaagagcgtggccatggatatgctcaacgaagtgaagcggtgccccgacgagctgttcacaacactgtctgccgagaagcagtcccggttcagaatcatcagcgacgaccacaatgaagtgctgatgaagcggagcagcgacagattcgtgcctctgctgctgcagtatatcgattacggcaagctgttcgaccacatcaggttccacgtgaacatgggcaagctgagatacctgctgaaggccgacaagacctgcatcgacggccagaccagagtcagagtgatcgagcagcccctgaacggcttcggcagactggaagaggccgagacaatgcggaagcaagagaacggcaccttcggcaacagcggcatccggatcagagacttcgagaacatgaagcgggacgacgccaatcctgccaactatccctacatcgtggacacctacacacactacatcctggaaaacaacaaggtcgagatgtttatcaacgacaaagaggacagcgccccactgctgcccgtgatcgaggatgatagatacgtggtcaagacaatccccagctgccggatgagcaccctggaaattccagccatggccttccacatgtttctgttcggcagcaagaaaaccgagaagctgatcgtggacgtgcacaaccggtacaagagactgttccaggccatgcagaaagaagaagtgaccgccgagaatatcgccagcttcggaatcgccgagagcgacctgcctcagaagatcctggatctgatcagcggcaatgcccacggcaaggatgtggacgccttcatcagactgaccgtggacgacatgctgaccgacaccgagcggagaatcaagagattcaaggacgaccggaagtccattcggagcgccgacaacaagatgggaaagagaggcttcaagcagatctccacaggcaagctggccgacttcctggccaaggacatcgtgctgtttcagcccagcgtgaacgatggcgagaacaagatcaccggcctgaactaccggatcatgcagagcgccattgccgtgtacgatagcggcgacgattacgaggccaagcagcagttcaagctgatgttcgagaaggcccggctgatcggcaagggcacaacagagcctcatccatttctgtacaaggtgttcgcccgcagcatccccgccaatgccgtcgagttctacgagcgctacctgatcgagcggaagttctacctgaccggcctgtccaacgagatcaagaaaggcaacagagtggatgtgcccttcatccggcgggaccagaacaagtggaaaacacccgccatgaagaccctgggcagaatctacagcgaggatctgcccgtggaactgcccagacagatgttcgacaatgagatcaagtcccacctgaagtccctgccacagatggaaggcatcgacttcaacaatgccaacgtgacctatctgatcgccgagtacatgaagagagtgctggacgacgacttccagaccttctaccagtggaaccgcaactaccggtacatggacatgcttaagggcgagtacgacagaaagggctccctgcagcactgcttcaccagcgtggaagagagagaaggcctctggaaagagcgggcctccagaacagagcggtacagaaagcaggccagcaacaagatccgcagcaaccggcagatgagaaacgccagcagcgaagagatcgagacaatcctggataagcggctgagcaacagccggaacgagtaccagaaaagcgagaaagtgatccggcgctacagagtgcaggatgccctgctgtttctgctggccaaaaagaccctgaccgaactggccgatttcgacggcgagaggttcaaactgaaagaaatcatgcccgacgccgagaagggaatcctgagcgagatcatgcccatgagcttcaccttcgagaaaggcggcaagaagtacaccatcaccagcgagggcatgaagctgaagaactacggcgacttctttgtgctggctagcgacaagaggatcggcaacctgctggaactcgtgggcagcgacatcgtgtccaaagaggatatcatggaagagttcaacaaatacgaccagtgcaggcccgagatcagctccatcgtgttcaacctggaaaagtgggccttcgacacataccccgagctgtctgccagagtggaccgggaagagaaggtggacttcaagagcatcctgaaaatcctgctgaacaacaagaacatcaacaaagagcagagcgacatcctgcggaagatccggaacgccttcgatcacaacaattaccccgacaaaggcgtggtggaaatcaaggccctgcctgagatcgccatgagcatcaagaaggcctttggggagtacgccatcatgaagtagtaa

SEQ ID NO: 150 - DNA, 3450 bp, Artificial Sequence
  Chemically Synthesized
atggactacaaagaccatgacggtgattataaagatcatgacatcgattacaaggatgacgatgacaagggcggaatgagtgtgttgacgccgttgcttctgcgagggcttaccgggtctgctagaagacttccggtccccagggccaagatacatagcctcggagacccgggaggcaacatccccgctctggtggaaaaccagaagaagtactttggcacctacagcgtgatggccatgctgaacgctcagaccgtgctggaccacatccagaaggtggccgatattgagggcgagcagaacgagaacaacgagaatctgtggtttcaccccgtgatgagccacctgtacaacgccaagaacggctacgacaagcagcccgagaaaaccatgttcatcatcgagcggctgcagagctacttcccattcctgaagatcatggccgagaaccagagagagtacagcaacggcaagtacaagcagaaccgcgtggaagtgaacagcaacgacatcttcgaggtgctgaagcgcgccttcggcgtgctgaagatgtacagggacctgaccaaccactacaagacctacgaggaaaagctgaacgacggctgcgagttcctgaccagcacagagcaacctctgagcggcatgatcaacaactactacacagtggccctgcggaacatgaacgagagatacggctacaagacagaggacctggccttcatccaggacaagcggttcaagttcgtgaaggacgcctacggcaagaaaaagtcccaagtgaataccggattcttcctgagcctgcaggactacaacggcgacacacagaagaagctgcacctgagcggagtgggaatcgccctgctgatctgcctgttcctggacaagcagtacatcaacatctttctgagcaggctgcccatcttctccagctacaatgcccagagcgaggaacggcggatcatcatcagatccttcggcatcaacagcatcaagctgcccaaggaccggatccacagcgagaagtccaacaagagcgtggccatggatatgctcaacgaagtgaagcggtgccccgacgagctgttcacaacactgtctgccgagaagcagtcccggttcagaatcatcagcgacgaccacaatgaagtgctgatgaagcggagcagcgacagattcgtgcctctgctgctgcagtatatcgattacggcaagctgttcgaccacatcaggttccacgtgaacatgggcaagctgagatacctgctgaaggccgacaagacctgcatcgacggccagaccagagtcagagtgatcgagcagcccctgaacggcttcggcagactggaagaggccgagacaatgcggaagcaagagaacggcaccttcggcaacagcggcatccggatcagagacttcgagaacatgaagcgggacgacgccaatcctgccaactatccctacatcgtggacacctacacacactacatcctggaaaacaacaaggtcgagatgtttatcaacgacaaagaggacagcgccccactgctgcccgtgatcgaggatgatagatacgtggtcaagacaatccccagctgccggatgagcaccctggaaattccagccatggccttccacatgtttctgttcggcagcaagaaaaccgagaagctgatcgtggacgtgcacaaccggtacaagagactgttccaggccatgcagaaagaagaagtgaccgccgagaatatcgccagcttcggaatcgccgagagcgacctgcctcagaagatcctggatctgatcagcggcaatgcccacggcaaggatgtggacgccttcatcagactgaccgtggacgacatgctgaccgacaccgagcggagaatcaagagattcaaggacgaccggaagtccattcggagcgccgacaacaagatgggaaagagaggcttcaagcagatctccacaggcaagctggccgacttcctggccaaggacatcgtgctgtttcagcccagcgtgaacgatggcgagaacaagatcaccggcctgaactaccggatcatgcagagcgccattgccgtgtacgatagcggcgacgattacgaggccaagcagcagttcaagctgatgttcgagaaggcccggctgatcggcaagggcacaacagagcctcatccatttctgtacaaggtgttcgcccgcagcatccccgccaatgccgtcgagttctacgagcgctacctgatcgagcggaagttctacctgaccggcctgtccaacgagatcaagaaaggcaacagagtggatgtgcccttcatccggcgggaccagaacaagtggaaaacacccgccatgaagaccctgggcagaatctacagcgaggatctgcccgtggaactgcccagacagatgttcgacaatgagatcaagtcccacctgaagtccctgccacagatggaaggcatcgacttcaacaatgccaacgtgacctatctgatcgccgagtacatgaagagagtgctggacgacgacttccagaccttctaccagtggaaccgcaactaccggtacatggacatgcttaagggcgagtacgacagaaagggctccctgcagcactgcttcaccagcgtggaagagagagaaggcctctggaaagagcgggcctccagaacagagcggtacagaaagcaggccagcaacaagatccgcagcaaccggcagatgagaaacgccagcagcgaagagatcgagacaatcctggataagcggctgagcaacagccggaacgagtaccagaaaagcgagaaagtgatccggcgctacagagtgcaggatgccctgctgtttctgctggccaaaaagaccctgaccgaactggccgatttcgacggcgagaggttcaaactgaaagaaatcatgcccgacgccgagaagggaatcctgagcgagatcatgcccatgagcttcaccttcgagaaaggcggcaagaagtacaccatcaccagcgagggcatgaagctgaagaactacggcgacttctttgtgctggctagcgacaagaggatcggcaacctgctggaactcgtgggcagcgacatcgtgtccaaagaggatatcatggaagagttcaacaaatacgaccagtgcaggcccgagatcagctccatcgtgttcaacctggaaaagtgggccttcgacacataccccgagctgtctgccagagtggaccgggaagagaaggtggacttcaagagcatcctgaaaatcctgctgaacaacaagaacatcaacaaagagcagagcgacatcctgcggaagatccggaacgccttcgatcacaacaattaccccgacaaaggcgtggtggaaatcaaggccctgcctgagatcgccatgagcatcaagaaggcctttggggagtacgccatcatgaagtagtaa

SEQ ID NO: 151 - DNA, 3744 bp, Artificial Sequence
  Chemically Synthesized
atggactacaaagaccatgacggtgattataaagatcatgacatcgattacaaggatgacgatgacaagggcggaatgagtgtgttgacgccgttgcttctgcgagggcttaccgggtctgctagaagacttccggtccccagggccaagatacatagcctcggagacccgatgtctgtgctcactcctctgcttttgcgaggactgactgggtccgccagacgactcccggtgccgagagctaaaatccatagcctgggaaaattggcaactatgtcagtcctgacgccgcttcttctccggggtcttacagggtctgcaagaaggctgcctgtacctcgggcgaaaattcatagcttgggcgacccgatgagtgtattgacgcccctgttgctgagaggattgactgggtcagcgcgccggctccctgtcccccgagctaagattcactcccttggtaagctgggaggcaacatccccgctctggtggaaaaccagaagaagtactttggcacctacagcgtgatggccatgctgaacgctcagaccgtgctggaccacatccagaaggtggccgatattgagggcgagcagaacgagaacaacgagaatctgtggtttcaccccgtgatgagccacctgtacaacgccaagaacggctacgacaagcagcccgagaaaaccatgttcatcatcgagcggctgcagagctacttcccattcctgaagatcatggccgagaaccagagagagtacagcaacggcaagtacaagcagaaccgcgtggaagtgaacagcaacgacatcttcgaggtgctgaagcgcgccttcggcgtgctgaagatgtacagggacctgaccaaccactacaagacctacgaggaaaagctgaacgacggctgcgagttcctgaccagcacagagcaacctctgagcggcatgatcaacaactactacacagtggccctgcggaacatgaacgagagatacggctacaagacagaggacctggccttcatccaggacaagcggttcaagttcgtgaaggacgcctacggcaagaaaaagtcccaagtgaataccggattcttcctgagcctgcaggactacaacggcgacacacagaagaagctgcacctgagcggagtgggaatcgccctgctgatctgcctgttcctggacaagcagtacatcaacatctttctgagcaggctgcccatcttctccagctacaatgcccagagcgaggaacggcggatcatcatcagatccttcggcatcaacagcatcaagctgcccaaggaccggatccacagcgagaagtccaacaagagcgtggccatggatatgctcaacgaagtgaagcggtgccccgacgagctgttcacaacactgtctgccgagaagcagtcccggttcagaatcatcagcgacgaccacaatgaagtgctgatgaagcggagcagcgacagattcgtgcctctgctgctgcagtatatcgattacggcaagctgttcgaccacatcaggttccacgtgaacatgggcaagctgagatacctgctgaaggccgacaagacctgcatcgacggccagaccagagtcagagtgatcgagcagcccctgaacggcttcggcagactggaagaggccgagacaatgcggaagcaagagaacggcaccttcggcaacagcggcatccggatcagagacttcgagaacatgaagcgggacgacgccaatcctgccaactatccctacatcgtggacacctacacacactacatcctggaaaacaacaaggtcgagatgtttatcaacgacaaagaggacagcgccccactgctgcccgtgatcgaggatgatagatacgtggtcaagacaatccccagctgccggatgagcaccctggaaattccagccatggccttccacatgtttctgttcggcagcaagaaaaccgagaagctgatcgtggacgtgcacaaccggtacaagagactgttccaggccatgcagaaagaagaagtgaccgccgagaatatcgccagcttcggaatcgccgagagcgacctgcctcagaagatcctggatctgatcagcggcaatgcccacggcaaggatgtggacgccttcatcagactgaccgtggacgacatgctgaccgacaccgagcggagaatcaagagattcaaggacgaccggaagtccattcggagcgccgacaacaagatgggaaagagaggcttcaagcagatctccacaggcaagctggccgacttcctggccaaggacatcgtgctgtttcagcccagcgtgaacgatggcgagaacaagatcaccggcctgaactaccggatcatgcagagcgccattgccgtgtacgatagcggcgacgattacgaggccaagcagcagttcaagctgatgttcgagaaggcccggctgatcggcaagggcacaacagagcctcatccatttctgtacaaggtgttcgcccgcagcatccccgccaatgccgtcgagttctacgagcgctacctgatcgagcggaagttctacctgaccggcctgtccaacgagatcaagaaaggcaacagagtggatgtgcccttcatccggcgggaccagaacaagtggaaaacacccgccatgaagaccctgggcagaatctacagcgaggatctgcccgtggaactgcccagacagatgttcgacaatgagatcaagtcccacctgaagtccctgccacagatggaaggcatcgacttcaacaatgccaacgtgacctatctgatcgccgagtacatgaagagagtgctggacgacgacttccagaccttctaccagtggaaccgcaactaccggtacatggacatgcttaagggcgagtacgacagaaagggctccctgcagcactgcttcaccagcgtggaagagagagaaggcctctggaaagagcgggcctccagaacagagcggtacagaaagcaggccagcaacaagatccgcagcaaccggcagatgagaaacgccagcagcgaagagatcgagacaatcctggataagcggctgagcaacagccggaacgagtaccagaaaagcgagaaagtgatccggcgctacagagtgcaggatgccctgctgtttctgctggccaaaaagaccctgaccgaactggccgatttcgacggcgagaggttcaaactgaaagaaatcatgcccgacgccgagaagggaatcctgagcgagatcatgcccatgagcttcaccttcgagaaaggcggcaagaagtacaccatcaccagcgagggcatgaagctgaagaactacggcgacttctttgtgctggctagcgacaagaggatcggcaacctgctggaactcgtgggcagcgacatcgtgtccaaagaggatatcatggaagagttcaacaaatacgaccagtgcaggcccgagatcagctccatcgtgttcaacctggaaaagtgggccttcgacacataccccgagctgtctgccagagtggaccgggaagagaaggtggacttcaagagcatcctgaaaatcctgctgaacaacaagaacatcaacaaagagcagagcgacatcctgcggaagatccggaacgccttcgatcacaacaattaccccgacaaaggcgtggtggaaatcaaggccctgcctgagatcgccatgagcatcaagaaggcctttggggagtacgccatcatgaagtagtaa

SEQ ID NO: 152 - DNA, 3414 bp, Artificial Sequence
  Chemically Synthesized
atggactacaaagaccatgacggtgattataaagatcatgacatcgattacaaggatgacgatgacaagggcggaatgtacaggatgcaactcctgtcttgcattgcactaagtcttgcacttgtcacgaattccggaggcaacatccccgctctggtggaaaaccagaagaagtactttggcacctacagcgtgatggccatgctgaacgctcagaccgtgctggaccacatccagaaggtggccgatattgagggcgagcagaacgagaacaacgagaatctgtggtttcaccccgtgatgagccacctgtacaacgccaagaacggctacgacaagcagcccgagaaaaccatgttcatcatcgagcggctgcagagctacttcccattcctgaagatcatggccgagaaccagagagagtacagcaacggcaagtacaagcagaaccgcgtggaagtgaacagcaacgacatcttcgaggtgctgaagcgcgccttcggcgtgctgaagatgtacagggacctgaccaaccactacaagacctacgaggaaaagctgaacgacggctgcgagttcctgaccagcacagagcaacctctgagcggcatgatcaacaactactacacagtggccctgcggaacatgaacgagagatacggctacaagacagaggacctggccttcatccaggacaagcggttcaagttcgtgaaggacgcctacggcaagaaaaagtcccaagtgaataccggattcttcctgagcctgcaggactacaacggcgacacacagaagaagctgcacctgagcggagtgggaatcgccctgctgatctgcctgttcctggacaagcagtacatcaacatctttctgagcaggctgcccatcttctccagctacaatgcccagagcgaggaacggcggatcatcatcagatccttcggcatcaacagcatcaagctgcccaaggaccggatccacagcgagaagtccaacaagagcgtggccatggatatgctcaacgaagtgaagcggtgccccgacgagctgttcacaacactgtctgccgagaagcagtcccggttcagaatcatcagcgacgaccacaatgaagtgctgatgaagcggagcagcgacagattcgtgcctctgctgctgcagtatatcgattacggcaagctgttcgaccacatcaggttccacgtgaacatgggcaagctgagatacctgctgaaggccgacaagacctgcatcgacggccagaccagagtcagagtgatcgagcagcccctgaacggcttcggcagactggaagaggccgagacaatgcggaagcaagagaacggcaccttcggcaacagcggcatccggatcagagacttcgagaacatgaagcgggacgacgccaatcctgccaactatccctacatcgtggacacctacacacactacatcctggaaaacaacaaggtcgagatgtttatcaacgacaaagaggacagcgccccactgctgcccgtgatcgaggatgatagatacgtggtcaagacaatccccagctgccggatgagcaccctggaaattccagccatggccttccacatgtttctgttcggcagcaagaaaaccgagaagctgatcgtggacgtgcacaaccggtacaagagactgttccaggccatgcagaaagaagaagtgaccgccgagaatatcgccagcttcggaatcgccgagagcgacctgcctcagaagatcctggatctgatcagcggcaatgcccacggcaaggatgtggacgccttcatcagactgaccgtggacgacatgctgaccgacaccgagcggagaatcaagagattcaaggacgaccggaagtccattcggagcgccgacaacaagatgggaaagagaggcttcaagcagatctccacaggcaagctggccgacttcctggccaaggacatcgtgctgtttcagcccagcgtgaacgatggcgagaacaagatcaccggcctgaactaccggatcatgcagagcgccattgccgtgtacgatagcggcgacgattacgaggccaagcagcagttcaagctgatgttcgagaaggcccggctgatcggcaagggcacaacagagcctcatccatttctgtacaaggtgttcgcccgcagcatccccgccaatgccgtcgagttctacgagcgctacctgatcgagcggaagttctacctgaccggcctgtccaacgagatcaagaaaggcaacagagtggatgtgcccttcatccggcgggaccagaacaagtggaaaacacccgccatgaagaccctgggcagaatctacagcgaggatctgcccgtggaactgcccagacagatgttcgacaatgagatcaagtcccacctgaagtccctgccacagatggaaggcatcgacttcaacaatgccaacgtgacctatctgatcgccgagtacatgaagagagtgctggacgacgacttccagaccttctaccagtggaaccgcaactaccggtacatggacatgcttaagggcgagtacgacagaaagggctccctgcagcactgcttcaccagcgtggaagagagagaaggcctctggaaagagcgggcctccagaacagagcggtacagaaagcaggccagcaacaagatccgcagcaaccggcagatgagaaacgccagcagcgaagagatcgagacaatcctggataagcggctgagcaacagccggaacgagtaccagaaaagcgagaaagtgatccggcgctacagagtgcaggatgccctgctgtttctgctggccaaaaagaccctgaccgaactggccgatttcgacggcgagaggttcaaactgaaagaaatcatgcccgacgccgagaagggaatcctgagcgagatcatgcccatgagcttcaccttcgagaaaggcggcaagaagtacaccatcaccagcgagggcatgaagctgaagaactacggcgacttctttgtgctggctagcgacaagaggatcggcaacctgctggaactcgtgggcagcgacatcgtgtccaaagaggatatcatggaagagttcaacaaatacgaccagtgcaggcccgagatcagctccatcgtgttcaacctggaaaagtgggccttcgacacataccccgagctgtctgccagagtggaccgggaagagaaggtggacttcaagagcatcctgaaaatcctgctgaacaacaagaacatcaacaaagagcagagcgacatcctgcggaagatccggaacgccttcgatcacaacaattaccccgacaaaggcgtggtggaaatcaaggccctgcctgagatcgccatgagcatcaagaaggcctttggggagtacgccatcatgaagtagtaa

SEQ ID NO: 153 - DNA, 3483 bp, Artificial Sequence
  Chemically Synthesized
atggactacaaagaccatgacggtgattataaagatcatgacatcgattacaaggatgacgatgacaagggcggaatgggttgttgtttcagcaagacagcggcgaaaggtgaagcagcagcagaaagaccaggcgaggctgcggtagcatcaagtccctccaaggctaatgggcaggaaaacggacacgtcaaagttggaagcggaggcaacatccccgctctggtggaaaaccagaagaagtactttggcacctacagcgtgatggccatgctgaacgctcagaccgtgctggaccacatccagaaggtggccgatattgagggcgagcagaacgagaacaacgagaatctgtggtttcaccccgtgatgagccacctgtacaacgccaagaacggctacgacaagcagcccgagaaaaccatgttcatcatcgagcggctgcagagctacttcccattcctgaagatcatggccgagaaccagagagagtacagcaacggcaagtacaagcagaaccgcgtggaagtgaacagcaacgacatcttcgaggtgctgaagcgcgccttcggcgtgctgaagatgtacagggacctgaccaaccactacaagacctacgaggaaaagctgaacgacggctgcgagttcctgaccagcacagagcaacctctgagcggcatgatcaacaactactacacagtggccctgcggaacatgaacgagagatacggctacaagacagaggacctggccttcatccaggacaagcggttcaagttcgtgaaggacgcctacggcaagaaaaagtcccaagtgaataccggattcttcctgagcctgcaggactacaacggcgacacacagaagaagctgcacctgagcggagtgggaatcgccctgctgatctgcctgttcctggacaagcagtacatcaacatctttctgagcaggctgcccatcttctccagctacaatgcccagagcgaggaacggcggatcatcatcagatccttcggcatcaacagcatcaagctgcccaaggaccggatccacagcgagaagtccaacaagagcgtggccatggatatgctcaacgaagtgaagcggtgccccgacgagctgttcacaacactgtctgccgagaagcagtcccggttcagaatcatcagcgacgaccacaatgaagtgctgatgaagcggagcagcgacagattcgtgcctctgctgctgcagtatatcgattacggcaagctgttcgaccacatcaggttccacgtgaacatgggcaagctgagatacctgctgaaggccgacaagacctgcatcgacggccagaccagagtcagagtgatcgagcagcccctgaacggcttcggcagactggaagaggccgagacaatgcggaagcaagagaacggcaccttcggcaacagcggcatccggatcagagacttcgagaacatgaagcgggacgacgccaatcctgccaactatccctacatcgtggacacctacacacactacatcctggaaaacaacaaggtcgagatgtttatcaacgacaaagaggacagcgccccactgctgcccgtgatcgaggatgatagatacgtggtcaagacaatccccagctgccggatgagcaccctggaaattccagccatggccttccacatgtttctgttcggcagcaagaaaaccgagaagctgatcgtggacgtgcacaaccggtacaagagactgttccaggccatgcagaaagaagaagtgaccgccgagaatatcgccagcttcggaatcgccgagagcgacctgcctcagaagatcctggatctgatcagcggcaatgcccacggcaaggatgtggacgccttcatcagactgaccgtggacgacatgctgaccgacaccgagcggagaatcaagagattcaaggacgaccggaagtccattcggagcgccgacaacaagatgggaaagagaggcttcaagcagatctccacaggcaagctggccgacttcctggccaaggacatcgtgctgtttcagcccagcgtgaacgatggcgagaacaagatcaccggcctgaactaccggatcatgcagagcgccattgccgtgtacgatagcggcgacgattacgaggccaagcagcagttcaagctgatgttcgagaaggcccggctgatcggcaagggcacaacagagcctcatccatttctgtacaaggtgttcgcccgcagcatccccgccaatgccgtcgagttctacgagcgctacctgatcgagcggaagttctacctgaccggcctgtccaacgagatcaagaaaggcaacagagtggatgtgcccttcatccggcgggaccagaacaagtggaaaacacccgccatgaagaccctgggcagaatctacagcgaggatctgcccgtggaactgcccagacagatgttcgacaatgagatcaagtcccacctgaagtccctgccacagatggaaggcatcgacttcaacaatgccaacgtgacctatctgatcgccgagtacatgaagagagtgctggacgacgacttccagaccttctaccagtggaaccgcaactaccggtacatggacatgcttaagggcgagtacgacagaaagggctccctgcagcactgcttcaccagcgtggaagagagagaaggcctctggaaagagcgggcctccagaacagagcggtacagaaagcaggccagcaacaagatccgcagcaaccggcagatgagaaacgccagcagcgaagagatcgagacaatcctggataagcggctgagcaacagccggaacgagtaccagaaaagcgagaaagtgatccggcgctacagagtgcaggatgccctgctgtttctgctggccaaaaagaccctgaccgaactggccgatttcgacggcgagaggttcaaactgaaagaaatcatgcccgacgccgagaagggaatcctgagcgagatcatgcccatgagcttcaccttcgagaaaggcggcaagaagtacaccatcaccagcgagggcatgaagctgaagaactacggcgacttctttgtgctggctagcgacaagaggatcggcaacctgctggaactcgtgggcagcgacatcgtgtccaaagaggatatcatggaagagttcaacaaatacgaccagtgcaggcccgagatcagctccatcgtgttcaacctggaaaagtgggccttcgacacataccccgagctgtctgccagagtggaccgggaagagaaggtggacttcaagagcatcctgaaaatcctgctgaacaacaagaacatcaacaaagagcagagcgacatcctgcggaagatccggaacgccttcgatcacaacaattaccccgacaaaggcgtggtggaaatcaaggccctgcctgagatcgccatgagcatcaagaaggcctttggggagtacgccatcatgaagtagtaa

SEQ ID NO: 154 - DNA, 3405 bp, Artificial Sequence
  Chemically Synthesized
atggactacaaagaccatgacggtgattataaagatcatgacatcgattacaaggatgacgatgacaagggcggaatgctgctgcccgtccccctgctgctgggcctgctgggcgccgccgccgacggaggcaacatccccgctctggtggaaaaccagaagaagtactttggcacctacagcgtgatggccatgctgaacgctcagaccgtgctggaccacatccagaaggtggccgatattgagggcgagcagaacgagaacaacgagaatctgtggtttcaccccgtgatgagccacctgtacaacgccaagaacggctacgacaagcagcccgagaaaaccatgttcatcatcgagcggctgcagagctacttcccattcctgaagatcatggccgagaaccagagagagtacagcaacggcaagtacaagcagaaccgcgtggaagtgaacagcaacgacatcttcgaggtgctgaagcgcgccttcggcgtgctgaagatgtacagggacctgaccaaccactacaagacctacgaggaaaagctgaacgacggctgcgagttcctgaccagcacagagcaacctctgagcggcatgatcaacaactactacacagtggccctgcggaacatgaacgagagatacggctacaagacagaggacctggccttcatccaggacaagcggttcaagttcgtgaaggacgcctacggcaagaaaaagtcccaagtgaataccggattcttcctgagcctgcaggactacaacggcgacacacagaagaagctgcacctgagcggagtgggaatcgccctgctgatctgcctgttcctggacaagcagtacatcaacatctttctgagcaggctgcccatcttctccagctacaatgcccagagcgaggaacggcggatcatcatcagatccttcggcatcaacagcatcaagctgcccaaggaccggatccacagcgagaagtccaacaagagcgtggccatggatatgctcaacgaagtgaagcggtgccccgacgagctgttcacaacactgtctgccgagaagcagtcccggttcagaatcatcagcgacgaccacaatgaagtgctgatgaagcggagcagcgacagattcgtgcctctgctgctgcagtatatcgattacggcaagctgttcgaccacatcaggttccacgtgaacatgggcaagctgagatacctgctgaaggccgacaagacctgcatcgacggccagaccagagtcagagtgatcgagcagcccctgaacggcttcggcagactggaagaggccgagacaatgcggaagcaagagaacggcaccttcggcaacagcggcatccggatcagagacttcgagaacatgaagcgggacgacgccaatcctgccaactatccctacatcgtggacacctacacacactacatcctggaaaacaacaaggtcgagatgtttatcaacgacaaagaggacagcgccccactgctgcccgtgatcgaggatgatagatacgtggtcaagacaatccccagctgccggatgagcaccctggaaattccagccatggccttccacatgtttctgttcggcagcaagaaaaccgagaagctgatcgtggacgtgcacaaccggtacaagagactgttccaggccatgcagaaagaagaagtgaccgccgagaatatcgccagcttcggaatcgccgagagcgacctgcctcagaagatcctggatctgatcagcggcaatgcccacggcaaggatgtggacgccttcatcagactgaccgtggacgacatgctgaccgacaccgagcggagaatcaagagattcaaggacgaccggaagtccattcggagcgccgacaacaagatgggaaagagaggcttcaagcagatctccacaggcaagctggccgacttcctggccaaggacatcgtgctgtttcagcccagcgtgaacgatggcgagaacaagatcaccggcctgaactaccggatcatgcagagcgccattgccgtgtacgatagcggcgacgattacgaggccaagcagcagttcaagctgatgttcgagaaggcccggctgatcggcaagggcacaacagagcctcatccatttctgtacaaggtgttcgcccgcagcatccccgccaatgccgtcgagttctacgagcgctacctgatcgagcggaagttctacctgaccggcctgtccaacgagatcaagaaaggcaacagagtggatgtgcccttcatccggcgggaccagaacaagtggaaaacacccgccatgaagaccctgggcagaatctacagcgaggatctgcccgtggaactgcccagacagatgttcgacaatgagatcaagtcccacctgaagtccctgccacagatggaaggcatcgacttcaacaatgccaacgtgacctatctgatcgccgagtacatgaagagagtgctggacgacgacttccagaccttctaccagtggaaccgcaactaccggtacatggacatgcttaagggcgagtacgacagaaagggctccctgcagcactgcttcaccagcgtggaagagagagaaggcctctggaaagagcgggcctccagaacagagcggtacagaaagcaggccagcaacaagatccgcagcaaccggcagatgagaaacgccagcagcgaagagatcgagacaatcctggataagcggctgagcaacagccggaacgagtaccagaaaagcgagaaagtgatccggcgctacagagtgcaggatgccctgctgtttctgctggccaaaaagaccctgaccgaactggccgatttcgacggcgagaggttcaaactgaaagaaatcatgcccgacgccgagaagggaatcctgagcgagatcatgcccatgagcttcaccttcgagaaaggcggcaagaagtacaccatcaccagcgagggcatgaagctgaagaactacggcgacttctttgtgctggctagcgacaagaggatcggcaacctgctggaactcgtgggcagcgacatcgtgtccaaagaggatatcatggaagagttcaacaaatacgaccagtgcaggcccgagatcagctccatcgtgttcaacctggaaaagtgggccttcgacacataccccgagctgtctgccagagtggaccgggaagagaaggtggacttcaagagcatcctgaaaatcctgctgaacaacaagaacatcaacaaagagcagagcgacatcctgcggaagatccggaacgccttcgatcacaacaattaccccgacaaaggcgtggtggaaatcaaggccctgcctgagatcgccatgagcatcaagaaggcctttggggagtacgccatcatgaagtagtaa

SEQ ID NO: 155 - DNA, 3384 bp, Artificial Sequence
  Chemically Synthesized
atggactacaaagaccatgacggtgattataaagatcatgacatcgattacaaggatgacgatgacaagggcggagggatcactctcggcaaggacgagctgtaaggaggcaacatccccgctctggtggaaaaccagaagaagtactttggcacctacagcgtgatggccatgctgaacgctcagaccgtgctggaccacatccagaaggtggccgatattgagggcgagcagaacgagaacaacgagaatctgtggtttcaccccgtgatgagccacctgtacaacgccaagaacggctacgacaagcagcccgagaaaaccatgttcatcatcgagcggctgcagagctacttcccattcctgaagatcatggccgagaaccagagagagtacagcaacggcaagtacaagcagaaccgcgtggaagtgaacagcaacgacatcttcgaggtgctgaagcgcgccttcggcgtgctgaagatgtacagggacctgaccaaccactacaagacctacgaggaaaagctgaacgacggctgcgagttcctgaccagcacagagcaacctctgagcggcatgatcaacaactactacacagtggccctgcggaacatgaacgagagatacggctacaagacagaggacctggccttcatccaggacaagcggttcaagttcgtgaaggacgcctacggcaagaaaaagtcccaagtgaataccggattcttcctgagcctgcaggactacaacggcgacacacagaagaagctgcacctgagcggagtgggaatcgccctgctgatctgcctgttcctggacaagcagtacatcaacatctttctgagcaggctgcccatcttctccagctacaatgcccagagcgaggaacggcggatcatcatcagatccttcggcatcaacagcatcaagctgcccaaggaccggatccacagcgagaagtccaacaagagcgtggccatggatatgctcaacgaagtgaagcggtgccccgacgagctgttcacaacactgtctgccgagaagcagtcccggttcagaatcatcagcgacgaccacaatgaagtgctgatgaagcggagcagcgacagattcgtgcctctgctgctgcagtatatcgattacggcaagctgttcgaccacatcaggttccacgtgaacatgggcaagctgagatacctgctgaaggccgacaagacctgcatcgacggccagaccagagtcagagtgatcgagcagcccctgaacggcttcggcagactggaagaggccgagacaatgcggaagcaagagaacggcaccttcggcaacagcggcatccggatcagagacttcgagaacatgaagcgggacgacgccaatcctgccaactatccctacatcgtggacacctacacacactacatcctggaaaacaacaaggtcgagatgtttatcaacgacaaagaggacagcgccccactgctgcccgtgatcgaggatgatagatacgtggtcaagacaatccccagctgccggatgagcaccctggaaattccagccatggccttccacatgtttctgttcggcagcaagaaaaccgagaagctgatcgtggacgtgcacaaccggtacaagagactgttccaggccatgcagaaagaagaagtgaccgccgagaatatcgccagcttcggaatcgccgagagcgacctgcctcagaagatcctggatctgatcagcggcaatgcccacggcaaggatgtggacgccttcatcagactgaccgtggacgacatgctgaccgacaccgagcggagaatcaagagattcaaggacgaccggaagtccattcggagcgccgacaacaagatgggaaagagaggcttcaagcagatctccacaggcaagctggccgacttcctggccaaggacatcgtgctgtttcagcccagcgtgaacgatggcgagaacaagatcaccggcctgaactaccggatcatgcagagcgccattgccgtgtacgatagcggcgacgattacgaggccaagcagcagttcaagctgatgttcgagaaggcccggctgatcggcaagggcacaacagagcctcatccatttctgtacaaggtgttcgcccgcagcatccccgccaatgccgtcgagttctacgagcgctacctgatcgagcggaagttctacctgaccggcctgtccaacgagatcaagaaaggcaacagagtggatgtgcccttcatccggcgggaccagaacaagtggaaaacacccgccatgaagaccctgggcagaatctacagcgaggatctgcccgtggaactgcccagacagatgttcgacaatgagatcaagtcccacctgaagtccctgccacagatggaaggcatcgacttcaacaatgccaacgtgacctatctgatcgccgagtacatgaagagagtgctggacgacgacttccagaccttctaccagtggaaccgcaactaccggtacatggacatgcttaagggcgagtacgacagaaagggctccctgcagcactgcttcaccagcgtggaagagagagaaggcctctggaaagagcgggcctccagaacagagcggtacagaaagcaggccagcaacaagatccgcagcaaccggcagatgagaaacgccagcagcgaagagatcgagacaatcctggataagcggctgagcaacagccggaacgagtaccagaaaagcgagaaagtgatccggcgctacagagtgcaggatgccctgctgtttctgctggccaaaaagaccctgaccgaactggccgatttcgacggcgagaggttcaaactgaaagaaatcatgcccgacgccgagaagggaatcctgagcgagatcatgcccatgagcttcaccttcgagaaaggcggcaagaagtacaccatcaccagcgagggcatgaagctgaagaactacggcgacttctttgtgctggctagcgacaagaggatcggcaacctgctggaactcgtgggcagcgacatcgtgtccaaagaggatatcatggaagagttcaacaaatacgaccagtgcaggcccgagatcagctccatcgtgttcaacctggaaaagtgggccttcgacacataccccgagctgtctgccagagtggaccgggaagagaaggtggacttcaagagcatcctgaaaatcctgctgaacaacaagaacatcaacaaagagcagagcgacatcctgcggaagatccggaacgccttcgatcacaacaattaccccgacaaaggcgtggtggaaatcaaggccctgcctgagatcgccatgagcatcaagaaggcctttggggagtacgccatcatgaagtagtaa

SEQ ID NO: 156 - DNA, 3366 bp, Artificial Sequence
  Chemically Synthesized
atggactacaaagaccatgacggtgattataaagatcatgacatcgattacaaggatgacgatgacaagggcggatccaaattataaggaggcaacatccccgctctggtggaaaaccagaagaagtactttggcacctacagcgtgatggccatgctgaacgctcagaccgtgctggaccacatccagaaggtggccgatattgagggcgagcagaacgagaacaacgagaatctgtggtttcaccccgtgatgagccacctgtacaacgccaagaacggctacgacaagcagcccgagaaaaccatgttcatcatcgagcggctgcagagctacttcccattcctgaagatcatggccgagaaccagagagagtacagcaacggcaagtacaagcagaaccgcgtggaagtgaacagcaacgacatcttcgaggtgctgaagcgcgccttcggcgtgctgaagatgtacagggacctgaccaaccactacaagacctacgaggaaaagctgaacgacggctgcgagttcctgaccagcacagagcaacctctgagcggcatgatcaacaactactacacagtggccctgcggaacatgaacgagagatacggctacaagacagaggacctggccttcatccaggacaagcggttcaagttcgtgaaggacgcctacggcaagaaaaagtcccaagtgaataccggattcttcctgagcctgcaggactacaacggcgacacacagaagaagctgcacctgagcggagtgggaatcgccctgctgatctgcctgttcctggacaagcagtacatcaacatctttctgagcaggctgcccatcttctccagctacaatgcccagagcgaggaacggcggatcatcatcagatccttcggcatcaacagcatcaagctgcccaaggaccggatccacagcgagaagtccaacaagagcgtggccatggatatgctcaacgaagtgaagcggtgccccgacgagctgttcacaacactgtctgccgagaagcagtcccggttcagaatcatcagcgacgaccacaatgaagtgctgatgaagcggagcagcgacagattcgtgcctctgctgctgcagtatatcgattacggcaagctgttcgaccacatcaggttccacgtgaacatgggcaagctgagatacctgctgaaggccgacaagacctgcatcgacggccagaccagagtcagagtgatcgagcagcccctgaacggcttcggcagactggaagaggccgagacaatgcggaagcaagagaacggcaccttcggcaacagcggcatccggatcagagacttcgagaacatgaagcgggacgacgccaatcctgccaactatccctacatcgtggacacctacacacactacatcctggaaaacaacaaggtcgagatgtttatcaacgacaaagaggacagcgccccactgctgcccgtgatcgaggatgatagatacgtggtcaagacaatccccagctgccggatgagcaccctggaaattccagccatggccttccacatgtttctgttcggcagcaagaaaaccgagaagctgatcgtggacgtgcacaaccggtacaagagactgttccaggccatgcagaaagaagaagtgaccgccgagaatatcgccagcttcggaatcgccgagagcgacctgcctcagaagatcctggatctgatcagcggcaatgcccacggcaaggatgtggacgccttcatcagactgaccgtggacgacatgctgaccgacaccgagcggagaatcaagagattcaaggacgaccggaagtccattcggagcgccgacaacaagatgggaaagagaggcttcaagcagatctccacaggcaagctggccgacttcctggccaaggacatcgtgctgtttcagcccagcgtgaacgatggcgagaacaagatcaccggcctgaactaccggatcatgcagagcgccattgccgtgtacgatagcggcgacgattacgaggccaagcagcagttcaagctgatgttcgagaaggcccggctgatcggcaagggcacaacagagcctcatccatttctgtacaaggtgttcgcccgcagcatccccgccaatgccgtcgagttctacgagcgctacctgatcgagcggaagttctacctgaccggcctgtccaacgagatcaagaaaggcaacagagtggatgtgcccttcatccggcgggaccagaacaagtggaaaacacccgccatgaagaccctgggcagaatctacagcgaggatctgcccgtggaactgcccagacagatgttcgacaatgagatcaagtcccacctgaagtccctgccacagatggaaggcatcgacttcaacaatgccaacgtgacctatctgatcgccgagtacatgaagagagtgctggacgacgacttccagaccttctaccagtggaaccgcaactaccggtacatggacatgcttaagggcgagtacgacagaaagggctccctgcagcactgcttcaccagcgtggaagagagagaaggcctctggaaagagcgggcctccagaacagagcggtacagaaagcaggccagcaacaagatccgcagcaaccggcagatgagaaacgccagcagcgaagagatcgagacaatcctggataagcggctgagcaacagccggaacgagtaccagaaaagcgagaaagtgatccggcgctacagagtgcaggatgccctgctgtttctgctggccaaaaagaccctgaccgaactggccgatttcgacggcgagaggttcaaactgaaagaaatcatgcccgacgccgagaagggaatcctgagcgagatcatgcccatgagcttcaccttcgagaaaggcggcaagaagtacaccatcaccagcgagggcatgaagctgaagaactacggcgacttctttgtgctggctagcgacaagaggatcggcaacctgctggaactcgtgggcagcgacatcgtgtccaaagaggatatcatggaagagttcaacaaatacgaccagtgcaggcccgagatcagctccatcgtgttcaacctggaaaagtgggccttcgacacataccccgagctgtctgccagagtggaccgggaagagaaggtggacttcaagagcatcctgaaaatcctgctgaacaacaagaacatcaacaaagagcagagcgacatcctgcggaagatccggaacgccttcgatcacaacaattaccccgacaaaggcgtggtggaaatcaaggccctgcctgagatcgccatgagcatcaagaaggcctttggggagtacgccatcatgaagtagtaa

SEQ ID NO: 157 - DNA, 3150 bp, Artificial Sequence
  Chemically Synthesized
atggactacaaagaccatgacggtgattataaagatcatgacatcgattacaaggatgacgatgacaagggcggaaactcaaagaaaaggtcactggaggacaacgaaacggaaatcaaagtctccagagacacctggaacactaagaacatgcggtccctggaaccgccacgaagcaagaaacggatacatggaggcaacatccccgctctggtggaaaaccagaagaagtactttggcacctacagcgtgatggccatgctgaacgctcagaccgtgctggaccacatccagaaggtggccgatattgagggcgagcagaacgagaacaacgagaatctgtggtttcaccccgtgatgagccacctgtacaacgccaagaacggctacgacaagcagcccgagaaaaccatgttcatcatcgagcggctgcagagctacttcccattcctgaagatcatggccgagaaccagagagagtacagcaacggcaagtacaagcagaaccgcgtggaagtgaacagcaacgacatcttcgaggtgctgaagcgcgccttcggcgtgctgaagatgtacagggacctgaccaaccactacaagacctacgaggaaaagctgaacgacggctgcgagttcctgaccagcacagagcaacctctgagcggcatgatcaacaactactacacagtggccctgcggaacatgaacgagagatacggctacaagacagaggacctggccttcatccaggacaagcggttcaagttcgtgaaggacgcctacggcaagaaaaagtcccaagtgaataccggattcttcctgagcctgcaggactacaacggcgacacacagaagaagctgcacctgagcggagtgggaatcgccctgctgatctgcctgttcctggacaagcagtacatcaacatctttctgagcaggctgcccatcttctccagctacaatgcccagagcgaggaacggcggatcatcatcagatccttcggcatcaacagcatcaagctgcccaaggaccggatccacagcgagaagtccaacaagagcgtggccatggatatgctcaacgaagtgaagcggtgccccgacgagctgttcacaacactgtctgccgagaagcagtcccggttcagaatcatcagcgacgaccacaatgaagtgctgatgaagcggagcagcgacagattcgtgcctctgctgctgcagtatatcgattacggcaagctgttcgaccacatcaggttccacgtgaacatgggcaagctgagatacctgctgaaggccgacaagacctgcatcgacggccagaccagagtcagagtgatcgagcagcccctgaacggcttcggcagactggaagaggccgagacaatgcggaagcaagagaacggcaccttcggcaacagcggcatccggatcagagacttcgagaacatgaagcgggacgacgccaatcctgccaactatccctacatcgtggacacctacacacactacatcctggaaaacaacaaggtcgagatgtttatcaacgacaaagaggacagcgccccactgctgcccgtgatcgaggatgatagatacgtggtcaagacaatccccagctgccggatgagcaccctggaaattccagccatggccttccacatgtttctgttcggcagcaagaaaaccgagaagctgatcgtggacgtgcacaaccggtacaagagactgttccaggccatgcagaaagaagaagtgaccgccgagaatatcgccagcttcggaatcgccgagagcgacctgcctcagaagatcctggatctgatcagcggcaatgcccacggcaaggatgtggacgccttcatcagactgaccgtggacgacatgctgaccgacaccgagcggagaatcaagagattcaaggacgaccggaagtccattcggagcgccgacaacaagatgggaaagagaggcttcaagcagatctccacaggcaagctggccgacttcctggccaaggacatcgtgctgtttcagcccagcgtgaacgatggcgagaacaagatcaccggcctgaactaccggatcatgcagagcgccattgccgtgtacgatagcggcgacgattacgaggccaagcagcagttcaagctgatgttcgagaaggcccggctgatcggcaagggcacaacagagcctcatccatttctgtacaaggtgttcgcccgcagcatccccgccaatgccgtcgagttctacgagcgctacctgatcgagcggaagttctacctgaccggcctgtccaacgagatcaagaaaggcaacagagtggatgtgcccttcatccggcgggaccagaacaagtggaaaacacccgccatgaagaccctgggcagaatctacagcgaggatctgcccgtggaactgcccagacagatgttcgacaatgagatcaagtcccacctgaagtccctgccacagatggaaggcatcgacttcaacaatgccaacgtgacctatctgatcgccgagtacatgaagagagtgctggacgacgacttccagaccttctaccagtggaaccgcaactaccggtacatggacatgcttaagggcgagtacgacagaaagggctccctgcagcactgcttcaccagcgtggaagagagagaaggcctctggaaagagcgggcctccagaacagagcggtacagaaagcaggccagcaacaagatccgcagcaaccggcagatgagaaacgccagcagcgaagagatcgagacaatcctggataagcggctgagcaacagccggaacgagtaccagaaaagcgagaaagtgatccggcgctacagagtgcaggatgccctgctgtttctgctggccaaaaagaccctgaccgaactggccgatttcgacggcgagaggttcaaactgaaagaaatcatgcccgacgccgagaagggaatcctgagcgagatcatgcccatgagcttcaccttcgagaaaggcggcaagaagtacaccatcaccagcgagggcatgaagctgaagaactacggcgacttctttgtgctggctagcgacaagaggatcggcaacctgctggaactcgtgggcagcgacatcgtgtccaaagaggattagtaa

SEQ ID NO: 158 - DNA, 3066 bp, Artificial Sequence
  Chemically Synthesized
atggactacaaagaccatgacggtgattataaagatcatgacatcgattacaaggatgacgatgacaagggcggacttcaactgcctccacttgaaagactgacactgggaggcaacatccccgctctggtggaaaaccagaagaagtactttggcacctacagcgtgatggccatgctgaacgctcagaccgtgctggaccacatccagaaggtggccgatattgagggcgagcagaacgagaacaacgagaatctgtggtttcaccccgtgatgagccacctgtacaacgccaagaacggctacgacaagcagcccgagaaaaccatgttcatcatcgagcggctgcagagctacttcccattcctgaagatcatggccgagaaccagagagagtacagcaacggcaagtacaagcagaaccgcgtggaagtgaacagcaacgacatcttcgaggtgctgaagcgcgccttcggcgtgctgaagatgtacagggacctgaccaaccactacaagacctacgaggaaaagctgaacgacggctgcgagttcctgaccagcacagagcaacctctgagcggcatgatcaacaactactacacagtggccctgcggaacatgaacgagagatacggctacaagacagaggacctggccttcatccaggacaagcggttcaagttcgtgaaggacgcctacggcaagaaaaagtcccaagtgaataccggattcttcctgagcctgcaggactacaacggcgacacacagaagaagctgcacctgagcggagtgggaatcgccctgctgatctgcctgttcctggacaagcagtacatcaacatctttctgagcaggctgcccatcttctccagctacaatgcccagagcgaggaacggcggatcatcatcagatccttcggcatcaacagcatcaagctgcccaaggaccggatccacagcgagaagtccaacaagagcgtggccatggatatgctcaacgaagtgaagcggtgccccgacgagctgttcacaacactgtctgccgagaagcagtcccggttcagaatcatcagcgacgaccacaatgaagtgctgatgaagcggagcagcgacagattcgtgcctctgctgctgcagtatatcgattacggcaagctgttcgaccacatcaggttccacgtgaacatgggcaagctgagatacctgctgaaggccgacaagacctgcatcgacggccagaccagagtcagagtgatcgagcagcccctgaacggcttcggcagactggaagaggccgagacaatgcggaagcaagagaacggcaccttcggcaacagcggcatccggatcagagacttcgagaacatgaagcgggacgacgccaatcctgccaactatccctacatcgtggacacctacacacactacatcctggaaaacaacaaggtcgagatgtttatcaacgacaaagaggacagcgccccactgctgcccgtgatcgaggatgatagatacgtggtcaagacaatccccagctgccggatgagcaccctggaaattccagccatggccttccacatgtttctgttcggcagcaagaaaaccgagaagctgatcgtggacgtgcacaaccggtacaagagactgttccaggccatgcagaaagaagaagtgaccgccgagaatatcgccagcttcggaatcgccgagagcgacctgcctcagaagatcctggatctgatcagcggcaatgcccacggcaaggatgtggacgccttcatcagactgaccgtggacgacatgctgaccgacaccgagcggagaatcaagagattcaaggacgaccggaagtccattcggagcgccgacaacaagatgggaaagagaggcttcaagcagatctccacaggcaagctggccgacttcctggccaaggacatcgtgctgtttcagcccagcgtgaacgatggcgagaacaagatcaccggcctgaactaccggatcatgcagagcgccattgccgtgtacgatagcggcgacgattacgaggccaagcagcagttcaagctgatgttcgagaaggcccggctgatcggcaagggcacaacagagcctcatccatttctgtacaaggtgttcgcccgcagcatccccgccaatgccgtcgagttctacgagcgctacctgatcgagcggaagttctacctgaccggcctgtccaacgagatcaagaaaggcaacagagtggatgtgcccttcatccggcgggaccagaacaagtggaaaacacccgccatgaagaccctgggcagaatctacagcgaggatctgcccgtggaactgcccagacagatgttcgacaatgagatcaagtcccacctgaagtccctgccacagatggaaggcatcgacttcaacaatgccaacgtgacctatctgatcgccgagtacatgaagagagtgctggacgacgacttccagaccttctaccagtggaaccgcaactaccggtacatggacatgcttaagggcgagtacgacagaaagggctccctgcagcactgcttcaccagcgtggaagagagagaaggcctctggaaagagcgggcctccagaacagagcggtacagaaagcaggccagcaacaagatccgcagcaaccggcagatgagaaacgccagcagcgaagagatcgagacaatcctggataagcggctgagcaacagccggaacgagtaccagaaaagcgagaaagtgatccggcgctacagagtgcaggatgccctgctgtttctgctggccaaaaagaccctgaccgaactggccgatttcgacggcgagaggttcaaactgaaagaaatcatgcccgacgccgagaagggaatcctgagcgagatcatgcccatgagcttcaccttcgagaaaggcggcaagaagtacaccatcaccagcgagggcatgaagctgaagaactacggcgacttctttgtgctggctagcgacaagaggatcggcaacctgctggaactcgtgggcagcgacatcgtgtccaaagaggattagtaa

SEQ ID NO: 159 - DNA, 3081 bp, Artificial Sequence
  Chemically Synthesized
atggactacaaagaccatgacggtgattataaagatcatgacatcgattacaaggatgacgatgacaagggcggaggatcccttcaactgcctccacttgaaagactgacactgggtagttccggaggcaacatccccgctctggtggaaaaccagaagaagtactttggcacctacagcgtgatggccatgctgaacgctcagaccgtgctggaccacatccagaaggtggccgatattgagggcgagcagaacgagaacaacgagaatctgtggtttcaccccgtgatgagccacctgtacaacgccaagaacggctacgacaagcagcccgagaaaaccatgttcatcatcgagcggctgcagagctacttcccattcctgaagatcatggccgagaaccagagagagtacagcaacggcaagtacaagcagaaccgcgtggaagtgaacagcaacgacatcttcgaggtgctgaagcgcgccttcggcgtgctgaagatgtacagggacctgaccaaccactacaagacctacgaggaaaagctgaacgacggctgcgagttcctgaccagcacagagcaacctctgagcggcatgatcaacaactactacacagtggccctgcggaacatgaacgagagatacggctacaagacagaggacctggccttcatccaggacaagcggttcaagttcgtgaaggacgcctacggcaagaaaaagtcccaagtgaataccggattcttcctgagcctgcaggactacaacggcgacacacagaagaagctgcacctgagcggagtgggaatcgccctgctgatctgcctgttcctggacaagcagtacatcaacatctttctgagcaggctgcccatcttctccagctacaatgcccagagcgaggaacggcggatcatcatcagatccttcggcatcaacagcatcaagctgcccaaggaccggatccacagcgagaagtccaacaagagcgtggccatggatatgctcaacgaagtgaagcggtgccccgacgagctgttcacaacactgtctgccgagaagcagtcccggttcagaatcatcagcgacgaccacaatgaagtgctgatgaagcggagcagcgacagattcgtgcctctgctgctgcagtatatcgattacggcaagctgttcgaccacatcaggttccacgtgaacatgggcaagctgagatacctgctgaaggccgacaagacctgcatcgacggccagaccagagtcagagtgatcgagcagcccctgaacggcttcggcagactggaagaggccgagacaatgcggaagcaagagaacggcaccttcggcaacagcggcatccggatcagagacttcgagaacatgaagcgggacgacgccaatcctgccaactatccctacatcgtggacacctacacacactacatcctggaaaacaacaaggtcgagatgtttatcaacgacaaagaggacagcgccccactgctgcccgtgatcgaggatgatagatacgtggtcaagacaatccccagctgccggatgagcaccctggaaattccagccatggccttccacatgtttctgttcggcagcaagaaaaccgagaagctgatcgtggacgtgcacaaccggtacaagagactgttccaggccatgcagaaagaagaagtgaccgccgagaatatcgccagcttcggaatcgccgagagcgacctgcctcagaagatcctggatctgatcagcggcaatgcccacggcaaggatgtggacgccttcatcagactgaccgtggacgacatgctgaccgacaccgagcggagaatcaagagattcaaggacgaccggaagtccattcggagcgccgacaacaagatgggaaagagaggcttcaagcagatctccacaggcaagctggccgacttcctggccaaggacatcgtgctgtttcagcccagcgtgaacgatggcgagaacaagatcaccggcctgaactaccggatcatgcagagcgccattgccgtgtacgatagcggcgacgattacgaggccaagcagcagttcaagctgatgttcgagaaggcccggctgatcggcaagggcacaacagagcctcatccatttctgtacaaggtgttcgcccgcagcatccccgccaatgccgtcgagttctacgagcgctacctgatcgagcggaagttctacctgaccggcctgtccaacgagatcaagaaaggcaacagagtggatgtgcccttcatccggcgggaccagaacaagtggaaaacacccgccatgaagaccctgggcagaatctacagcgaggatctgcccgtggaactgcccagacagatgttcgacaatgagatcaagtcccacctgaagtccctgccacagatggaaggcatcgacttcaacaatgccaacgtgacctatctgatcgccgagtacatgaagagagtgctggacgacgacttccagaccttctaccagtggaaccgcaactaccggtacatggacatgcttaagggcgagtacgacagaaagggctccctgcagcactgcttcaccagcgtggaagagagagaaggcctctggaaagagcgggcctccagaacagagcggtacagaaagcaggccagcaacaagatccgcagcaaccggcagatgagaaacgccagcagcgaagagatcgagacaatcctggataagcggctgagcaacagccggaacgagtaccagaaaagcgagaaagtgatccggcgctacagagtgcaggatgccctgctgtttctgctggccaaaaagaccctgaccgaactggccgatttcgacggcgagaggttcaaactgaaagaaatcatgcccgacgccgagaagggaatcctgagcgagatcatgcccatgagcttcaccttcgagaaaggcggcaagaagtacaccatcaccagcgagggcatgaagctgaagaactacggcgacttctttgtgctggctagcgacaagaggatcggcaacctgctggaactcgtgggcagcgacatcgtgtccaaagaggattagtaa

SEQ ID NO: 160 - DNA, 3129 bp, Artificial Sequence
  Chemically Synthesized
atggactacaaagaccatgacggtgattataaagatcatgacatcgattacaaggatgacgatgacaagggcggaatgagtgtgttgacgccgttgcttctgcgagggcttaccgggtctgctagaagacttccggtccccagggccaagatacatagcctcggagacccgggaggcaacatccccgctctggtggaaaaccagaagaagtactttggcacctacagcgtgatggccatgctgaacgctcagaccgtgctggaccacatccagaaggtggccgatattgagggcgagcagaacgagaacaacgagaatctgtggtttcaccccgtgatgagccacctgtacaacgccaagaacggctacgacaagcagcccgagaaaaccatgttcatcatcgagcggctgcagagctacttcccattcctgaagatcatggccgagaaccagagagagtacagcaacggcaagtacaagcagaaccgcgtggaagtgaacagcaacgacatcttcgaggtgctgaagcgcgccttcggcgtgctgaagatgtacagggacctgaccaaccactacaagacctacgaggaaaagctgaacgacggctgcgagttcctgaccagcacagagcaacctctgagcggcatgatcaacaactactacacagtggccctgcggaacatgaacgagagatacggctacaagacagaggacctggccttcatccaggacaagcggttcaagttcgtgaaggacgcctacggcaagaaaaagtcccaagtgaataccggattcttcctgagcctgcaggactacaacggcgacacacagaagaagctgcacctgagcggagtgggaatcgccctgctgatctgcctgttcctggacaagcagtacatcaacatctttctgagcaggctgcccatcttctccagctacaatgcccagagcgaggaacggcggatcatcatcagatccttcggcatcaacagcatcaagctgcccaaggaccggatccacagcgagaagtccaacaagagcgtggccatggatatgctcaacgaagtgaagcggtgccccgacgagctgttcacaacactgtctgccgagaagcagtcccggttcagaatcatcagcgacgaccacaatgaagtgctgatgaagcggagcagcgacagattcgtgcctctgctgctgcagtatatcgattacggcaagctgttcgaccacatcaggttccacgtgaacatgggcaagctgagatacctgctgaaggccgacaagacctgcatcgacggccagaccagagtcagagtgatcgagcagcccctgaacggcttcggcagactggaagaggccgagacaatgcggaagcaagagaacggcaccttcggcaacagcggcatccggatcagagacttcgagaacatgaagcgggacgacgccaatcctgccaactatccctacatcgtggacacctacacacactacatcctggaaaacaacaaggtcgagatgtttatcaacgacaaagaggacagcgccccactgctgcccgtgatcgaggatgatagatacgtggtcaagacaatccccagctgccggatgagcaccctggaaattccagccatggccttccacatgtttctgttcggcagcaagaaaaccgagaagctgatcgtggacgtgcacaaccggtacaagagactgttccaggccatgcagaaagaagaagtgaccgccgagaatatcgccagcttcggaatcgccgagagcgacctgcctcagaagatcctggatctgatcagcggcaatgcccacggcaaggatgtggacgccttcatcagactgaccgtggacgacatgctgaccgacaccgagcggagaatcaagagattcaaggacgaccggaagtccattcggagcgccgacaacaagatgggaaagagaggcttcaagcagatctccacaggcaagctggccgacttcctggccaaggacatcgtgctgtttcagcccagcgtgaacgatggcgagaacaagatcaccggcctgaactaccggatcatgcagagcgccattgccgtgtacgatagcggcgacgattacgaggccaagcagcagttcaagctgatgttcgagaaggcccggctgatcggcaagggcacaacagagcctcatccatttctgtacaaggtgttcgcccgcagcatccccgccaatgccgtcgagttctacgagcgctacctgatcgagcggaagttctacctgaccggcctgtccaacgagatcaagaaaggcaacagagtggatgtgcccttcatccggcgggaccagaacaagtggaaaacacccgccatgaagaccctgggcagaatctacagcgaggatctgcccgtggaactgcccagacagatgttcgacaatgagatcaagtcccacctgaagtccctgccacagatggaaggcatcgacttcaacaatgccaacgtgacctatctgatcgccgagtacatgaagagagtgctggacgacgacttccagaccttctaccagtggaaccgcaactaccggtacatggacatgcttaagggcgagtacgacagaaagggctccctgcagcactgcttcaccagcgtggaagagagagaaggcctctggaaagagcgggcctccagaacagagcggtacagaaagcaggccagcaacaagatccgcagcaaccggcagatgagaaacgccagcagcgaagagatcgagacaatcctggataagcggctgagcaacagccggaacgagtaccagaaaagcgagaaagtgatccggcgctacagagtgcaggatgccctgctgtttctgctggccaaaaagaccctgaccgaactggccgatttcgacggcgagaggttcaaactgaaagaaatcatgcccgacgccgagaagggaatcctgagcgagatcatgcccatgagcttcaccttcgagaaaggcggcaagaagtacaccatcaccagcgagggcatgaagctgaagaactacggcgacttctttgtgctggctagcgacaagaggatcggcaacctgctggaactcgtgggcagcgacatcgtgtccaaagaggattagtaa

SEQ ID NO: 161 - DNA, 3423 bp, Artificial Sequence
  Chemically Synthesized
atggactacaaagaccatgacggtgattataaagatcatgacatcgattacaaggatgacgatgacaagggcggaatgagtgtgttgacgccgttgcttctgcgagggcttaccgggtctgctagaagacttccggtccccagggccaagatacatagcctcggagacccgatgtctgtgctcactcctctgcttttgcgaggactgactgggtccgccagacgactcccggtgccgagagctaaaatccatagcctgggaaaattggcaactatgtcagtcctgacgccgcttcttctccggggtcttacagggtctgcaagaaggctgcctgtacctcgggcgaaaattcatagcttgggcgacccgatgagtgtattgacgcccctgttgctgagaggattgactgggtcagcgcgccggctccctgtcccccgagctaagattcactcccttggtaagctgggaggcaacatccccgctctggtggaaaaccagaagaagtactttggcacctacagcgtgatggccatgctgaacgctcagaccgtgctggaccacatccagaaggtggccgatattgagggcgagcagaacgagaacaacgagaatctgtggtttcaccccgtgatgagccacctgtacaacgccaagaacggctacgacaagcagcccgagaaaaccatgttcatcatcgagcggctgcagagctacttcccattcctgaagatcatggccgagaaccagagagagtacagcaacggcaagtacaagcagaaccgcgtggaagtgaacagcaacgacatcttcgaggtgctgaagcgcgccttcggcgtgctgaagatgtacagggacctgaccaaccactacaagacctacgaggaaaagctgaacgacggctgcgagttcctgaccagcacagagcaacctctgagcggcatgatcaacaactactacacagtggccctgcggaacatgaacgagagatacggctacaagacagaggacctggccttcatccaggacaagcggttcaagttcgtgaaggacgcctacggcaagaaaaagtcccaagtgaataccggattcttcctgagcctgcaggactacaacggcgacacacagaagaagctgcacctgagcggagtgggaatcgccctgctgatctgcctgttcctggacaagcagtacatcaacatctttctgagcaggctgcccatcttctccagctacaatgcccagagcgaggaacggcggatcatcatcagatccttcggcatcaacagcatcaagctgcccaaggaccggatccacagcgagaagtccaacaagagcgtggccatggatatgctcaacgaagtgaagcggtgccccgacgagctgttcacaacactgtctgccgagaagcagtcccggttcagaatcatcagcgacgaccacaatgaagtgctgatgaagcggagcagcgacagattcgtgcctctgctgctgcagtatatcgattacggcaagctgttcgaccacatcaggttccacgtgaacatgggcaagctgagatacctgctgaaggccgacaagacctgcatcgacggccagaccagagtcagagtgatcgagcagcccctgaacggcttcggcagactggaagaggccgagacaatgcggaagcaagagaacggcaccttcggcaacagcggcatccggatcagagacttcgagaacatgaagcgggacgacgccaatcctgccaactatccctacatcgtggacacctacacacactacatcctggaaaacaacaaggtcgagatgtttatcaacgacaaagaggacagcgccccactgctgcccgtgatcgaggatgatagatacgtggtcaagacaatccccagctgccggatgagcaccctggaaattccagccatggccttccacatgtttctgttcggcagcaagaaaaccgagaagctgatcgtggacgtgcacaaccggtacaagagactgttccaggccatgcagaaagaagaagtgaccgccgagaatatcgccagcttcggaatcgccgagagcgacctgcctcagaagatcctggatctgatcagcggcaatgcccacggcaaggatgtggacgccttcatcagactgaccgtggacgacatgctgaccgacaccgagcggagaatcaagagattcaaggacgaccggaagtccattcggagcgccgacaacaagatgggaaagagaggcttcaagcagatctccacaggcaagctggccgacttcctggccaaggacatcgtgctgtttcagcccagcgtgaacgatggcgagaacaagatcaccggcctgaactaccggatcatgcagagcgccattgccgtgtacgatagcggcgacgattacgaggccaagcagcagttcaagctgatgttcgagaaggcccggctgatcggcaagggcacaacagagcctcatccatttctgtacaaggtgttcgcccgcagcatccccgccaatgccgtcgagttctacgagcgctacctgatcgagcggaagttctacctgaccggcctgtccaacgagatcaagaaaggcaacagagtggatgtgcccttcatccggcgggaccagaacaagtggaaaacacccgccatgaagaccctgggcagaatctacagcgaggatctgcccgtggaactgcccagacagatgttcgacaatgagatcaagtcccacctgaagtccctgccacagatggaaggcatcgacttcaacaatgccaacgtgacctatctgatcgccgagtacatgaagagagtgctggacgacgacttccagaccttctaccagtggaaccgcaactaccggtacatggacatgcttaagggcgagtacgacagaaagggctccctgcagcactgcttcaccagcgtggaagagagagaaggcctctggaaagagcgggcctccagaacagagcggtacagaaagcaggccagcaacaagatccgcagcaaccggcagatgagaaacgccagcagcgaagagatcgagacaatcctggataagcggctgagcaacagccggaacgagtaccagaaaagcgagaaagtgatccggcgctacagagtgcaggatgccctgctgtttctgctggccaaaaagaccctgaccgaactggccgatttcgacggcgagaggttcaaactgaaagaaatcatgcccgacgccgagaagggaatcctgagcgagatcatgcccatgagcttcaccttcgagaaaggcggcaagaagtacaccatcaccagcgagggcatgaagctgaagaactacggcgacttctttgtgctggctagcgacaagaggatcggcaacctgctggaactcgtgggcagcgacatcgtgtccaaagaggattagtaa

SEQ ID NO: 162 - DNA, 3093 bp, Artificial Sequence
  Chemically Synthesized
atggactacaaagaccatgacggtgattataaagatcatgacatcgattacaaggatgacgatgacaagggcggaatgtacaggatgcaactcctgtcttgcattgcactaagtcttgcacttgtcacgaattccggaggcaacatccccgctctggtggaaaaccagaagaagtactttggcacctacagcgtgatggccatgctgaacgctcagaccgtgctggaccacatccagaaggtggccgatattgagggcgagcagaacgagaacaacgagaatctgtggtttcaccccgtgatgagccacctgtacaacgccaagaacggctacgacaagcagcccgagaaaaccatgttcatcatcgagcggctgcagagctacttcccattcctgaagatcatggccgagaaccagagagagtacagcaacggcaagtacaagcagaaccgcgtggaagtgaacagcaacgacatcttcgaggtgctgaagcgcgccttcggcgtgctgaagatgtacagggacctgaccaaccactacaagacctacgaggaaaagctgaacgacggctgcgagttcctgaccagcacagagcaacctctgagcggcatgatcaacaactactacacagtggccctgcggaacatgaacgagagatacggctacaagacagaggacctggccttcatccaggacaagcggttcaagttcgtgaaggacgcctacggcaagaaaaagtcccaagtgaataccggattcttcctgagcctgcaggactacaacggcgacacacagaagaagctgcacctgagcggagtgggaatcgccctgctgatctgcctgttcctggacaagcagtacatcaacatctttctgagcaggctgcccatcttctccagctacaatgcccagagcgaggaacggcggatcatcatcagatccttcggcatcaacagcatcaagctgcccaaggaccggatccacagcgagaagtccaacaagagcgtggccatggatatgctcaacgaagtgaagcggtgccccgacgagctgttcacaacactgtctgccgagaagcagtcccggttcagaatcatcagcgacgaccacaatgaagtgctgatgaagcggagcagcgacagattcgtgcctctgctgctgcagtatatcgattacggcaagctgttcgaccacatcaggttccacgtgaacatgggcaagctgagatacctgctgaaggccgacaagacctgcatcgacggccagaccagagtcagagtgatcgagcagcccctgaacggcttcggcagactggaagaggccgagacaatgcggaagcaagagaacggcaccttcggcaacagcggcatccggatcagagacttcgagaacatgaagcgggacgacgccaatcctgccaactatccctacatcgtggacacctacacacactacatcctggaaaacaacaaggtcgagatgtttatcaacgacaaagaggacagcgccccactgctgcccgtgatcgaggatgatagatacgtggtcaagacaatccccagctgccggatgagcaccctggaaattccagccatggccttccacatgtttctgttcggcagcaagaaaaccgagaagctgatcgtggacgtgcacaaccggtacaagagactgttccaggccatgcagaaagaagaagtgaccgccgagaatatcgccagcttcggaatcgccgagagcgacctgcctcagaagatcctggatctgatcagcggcaatgcccacggcaaggatgtggacgccttcatcagactgaccgtggacgacatgctgaccgacaccgagcggagaatcaagagattcaaggacgaccggaagtccattcggagcgccgacaacaagatgggaaagagaggcttcaagcagatctccacaggcaagctggccgacttcctggccaaggacatcgtgctgtttcagcccagcgtgaacgatggcgagaacaagatcaccggcctgaactaccggatcatgcagagcgccattgccgtgtacgatagcggcgacgattacgaggccaagcagcagttcaagctgatgttcgagaaggcccggctgatcggcaagggcacaacagagcctcatccatttctgtacaaggtgttcgcccgcagcatccccgccaatgccgtcgagttctacgagcgctacctgatcgagcggaagttctacctgaccggcctgtccaacgagatcaagaaaggcaacagagtggatgtgcccttcatccggcgggaccagaacaagtggaaaacacccgccatgaagaccctgggcagaatctacagcgaggatctgcccgtggaactgcccagacagatgttcgacaatgagatcaagtcccacctgaagtccctgccacagatggaaggcatcgacttcaacaatgccaacgtgacctatctgatcgccgagtacatgaagagagtgctggacgacgacttccagaccttctaccagtggaaccgcaactaccggtacatggacatgcttaagggcgagtacgacagaaagggctccctgcagcactgcttcaccagcgtggaagagagagaaggcctctggaaagagcgggcctccagaacagagcggtacagaaagcaggccagcaacaagatccgcagcaaccggcagatgagaaacgccagcagcgaagagatcgagacaatcctggataagcggctgagcaacagccggaacgagtaccagaaaagcgagaaagtgatccggcgctacagagtgcaggatgccctgctgtttctgctggccaaaaagaccctgaccgaactggccgatttcgacggcgagaggttcaaactgaaagaaatcatgcccgacgccgagaagggaatcctgagcgagatcatgcccatgagcttcaccttcgagaaaggcggcaagaagtacaccatcaccagcgagggcatgaagctgaagaactacggcgacttctttgtgctggctagcgacaagaggatcggcaacctgctggaactcgtgggcagcgacatcgtgtccaaagaggattagtaa

SEQ ID NO: 163 - DNA, 3162 bp, Artificial Sequence
  Chemically Synthesized
atggactacaaagaccatgacggtgattataaagatcatgacatcgattacaaggatgacgatgacaagggcggaatgggttgttgtttcagcaagacagcggcgaaaggtgaagcagcagcagaaagaccaggcgaggctgcggtagcatcaagtccctccaaggctaatgggcaggaaaacggacacgtcaaagttggaagcggaggcaacatccccgctctggtggaaaaccagaagaagtactttggcacctacagcgtgatggccatgctgaacgctcagaccgtgctggaccacatccagaaggtggccgatattgagggcgagcagaacgagaacaacgagaatctgtggtttcaccccgtgatgagccacctgtacaacgccaagaacggctacgacaagcagcccgagaaaaccatgttcatcatcgagcggctgcagagctacttcccattcctgaagatcatggccgagaaccagagagagtacagcaacggcaagtacaagcagaaccgcgtggaagtgaacagcaacgacatcttcgaggtgctgaagcgcgccttcggcgtgctgaagatgtacagggacctgaccaaccactacaagacctacgaggaaaagctgaacgacggctgcgagttcctgaccagcacagagcaacctctgagcggcatgatcaacaactactacacagtggccctgcggaacatgaacgagagatacggctacaagacagaggacctggccttcatccaggacaagcggttcaagttcgtgaaggacgcctacggcaagaaaaagtcccaagtgaataccggattcttcctgagcctgcaggactacaacggcgacacacagaagaagctgcacctgagcggagtgggaatcgccctgctgatctgcctgttcctggacaagcagtacatcaacatctttctgagcaggctgcccatcttctccagctacaatgcccagagcgaggaacggcggatcatcatcagatccttcggcatcaacagcatcaagctgcccaaggaccggatccacagcgagaagtccaacaagagcgtggccatggatatgctcaacgaagtgaagcggtgccccgacgagctgttcacaacactgtctgccgagaagcagtcccggttcagaatcatcagcgacgaccacaatgaagtgctgatgaagcggagcagcgacagattcgtgcctctgctgctgcagtatatcgattacggcaagctgttcgaccacatcaggttccacgtgaacatgggcaagctgagatacctgctgaaggccgacaagacctgcatcgacggccagaccagagtcagagtgatcgagcagcccctgaacggcttcggcagactggaagaggccgagacaatgcggaagcaagagaacggcaccttcggcaacagcggcatccggatcagagacttcgagaacatgaagcgggacgacgccaatcctgccaactatccctacatcgtggacacctacacacactacatcctggaaaacaacaaggtcgagatgtttatcaacgacaaagaggacagcgccccactgctgcccgtgatcgaggatgatagatacgtggtcaagacaatccccagctgccggatgagcaccctggaaattccagccatggccttccacatgtttctgttcggcagcaagaaaaccgagaagctgatcgtggacgtgcacaaccggtacaagagactgttccaggccatgcagaaagaagaagtgaccgccgagaatatcgccagcttcggaatcgccgagagcgacctgcctcagaagatcctggatctgatcagcggcaatgcccacggcaaggatgtggacgccttcatcagactgaccgtggacgacatgctgaccgacaccgagcggagaatcaagagattcaaggacgaccggaagtccattcggagcgccgacaacaagatgggaaagagaggcttcaagcagatctccacaggcaagctggccgacttcctggccaaggacatcgtgctgtttcagcccagcgtgaacgatggcgagaacaagatcaccggcctgaactaccggatcatgcagagcgccattgccgtgtacgatagcggcgacgattacgaggccaagcagcagttcaagctgatgttcgagaaggcccggctgatcggcaagggcacaacagagcctcatccatttctgtacaaggtgttcgcccgcagcatccccgccaatgccgtcgagttctacgagcgctacctgatcgagcggaagttctacctgaccggcctgtccaacgagatcaagaaaggcaacagagtggatgtgcccttcatccggcgggaccagaacaagtggaaaacacccgccatgaagaccctgggcagaatctacagcgaggatctgcccgtggaactgcccagacagatgttcgacaatgagatcaagtcccacctgaagtccctgccacagatggaaggcatcgacttcaacaatgccaacgtgacctatctgatcgccgagtacatgaagagagtgctggacgacgacttccagaccttctaccagtggaaccgcaactaccggtacatggacatgcttaagggcgagtacgacagaaagggctccctgcagcactgcttcaccagcgtggaagagagagaaggcctctggaaagagcgggcctccagaacagagcggtacagaaagcaggccagcaacaagatccgcagcaaccggcagatgagaaacgccagcagcgaagagatcgagacaatcctggataagcggctgagcaacagccggaacgagtaccagaaaagcgagaaagtgatccggcgctacagagtgcaggatgccctgctgtttctgctggccaaaaagaccctgaccgaactggccgatttcgacggcgagaggttcaaactgaaagaaatcatgcccgacgccgagaagggaatcctgagcgagatcatgcccatgagcttcaccttcgagaaaggcggcaagaagtacaccatcaccagcgagggcatgaagctgaagaactacggcgacttctttgtgctggctagcgacaagaggatcggcaacctgctggaactcgtgggcagcgacatcgtgtccaaagaggattagtaa

SEQ ID NO: 164 - DNA, 3084 bp, Artificial Sequence
  Chemically Synthesized
atggactacaaagaccatgacggtgattataaagatcatgacatcgattacaaggatgacgatgacaagggcggaatgctgctgcccgtccccctgctgctgggcctgctgggcgccgccgccgacggaggcaacatccccgctctggtggaaaaccagaagaagtactttggcacctacagcgtgatggccatgctgaacgctcagaccgtgctggaccacatccagaaggtggccgatattgagggcgagcagaacgagaacaacgagaatctgtggtttcaccccgtgatgagccacctgtacaacgccaagaacggctacgacaagcagcccgagaaaaccatgttcatcatcgagcggctgcagagctacttcccattcctgaagatcatggccgagaaccagagagagtacagcaacggcaagtacaagcagaaccgcgtggaagtgaacagcaacgacatcttcgaggtgctgaagcgcgccttcggcgtgctgaagatgtacagggacctgaccaaccactacaagacctacgaggaaaagctgaacgacggctgcgagttcctgaccagcacagagcaacctctgagcggcatgatcaacaactactacacagtggccctgcggaacatgaacgagagatacggctacaagacagaggacctggccttcatccaggacaagcggttcaagttcgtgaaggacgcctacggcaagaaaaagtcccaagtgaataccggattcttcctgagcctgcaggactacaacggcgacacacagaagaagctgcacctgagcggagtgggaatcgccctgctgatctgcctgttcctggacaagcagtacatcaacatctttctgagcaggctgcccatcttctccagctacaatgcccagagcgaggaacggcggatcatcatcagatccttcggcatcaacagcatcaagctgcccaaggaccggatccacagcgagaagtccaacaagagcgtggccatggatatgctcaacgaagtgaagcggtgccccgacgagctgttcacaacactgtctgccgagaagcagtcccggttcagaatcatcagcgacgaccacaatgaagtgctgatgaagcggagcagcgacagattcgtgcctctgctgctgcagtatatcgattacggcaagctgttcgaccacatcaggttccacgtgaacatgggcaagctgagatacctgctgaaggccgacaagacctgcatcgacggccagaccagagtcagagtgatcgagcagcccctgaacggcttcggcagactggaagaggccgagacaatgcggaagcaagagaacggcaccttcggcaacagcggcatccggatcagagacttcgagaacatgaagcgggacgacgccaatcctgccaactatccctacatcgtggacacctacacacactacatcctggaaaacaacaaggtcgagatgtttatcaacgacaaagaggacagcgccccactgctgcccgtgatcgaggatgatagatacgtggtcaagacaatccccagctgccggatgagcaccctggaaattccagccatggccttccacatgtttctgttcggcagcaagaaaaccgagaagctgatcgtggacgtgcacaaccggtacaagagactgttccaggccatgcagaaagaagaagtgaccgccgagaatatcgccagcttcggaatcgccgagagcgacctgcctcagaagatcctggatctgatcagcggcaatgcccacggcaaggatgtggacgccttcatcagactgaccgtggacgacatgctgaccgacaccgagcggagaatcaagagattcaaggacgaccggaagtccattcggagcgccgacaacaagatgggaaagagaggcttcaagcagatctccacaggcaagctggccgacttcctggccaaggacatcgtgctgtttcagcccagcgtgaacgatggcgagaacaagatcaccggcctgaactaccggatcatgcagagcgccattgccgtgtacgatagcggcgacgattacgaggccaagcagcagttcaagctgatgttcgagaaggcccggctgatcggcaagggcacaacagagcctcatccatttctgtacaaggtgttcgcccgcagcatccccgccaatgccgtcgagttctacgagcgctacctgatcgagcggaagttctacctgaccggcctgtccaacgagatcaagaaaggcaacagagtggatgtgcccttcatccggcgggaccagaacaagtggaaaacacccgccatgaagaccctgggcagaatctacagcgaggatctgcccgtggaactgcccagacagatgttcgacaatgagatcaagtcccacctgaagtccctgccacagatggaaggcatcgacttcaacaatgccaacgtgacctatctgatcgccgagtacatgaagagagtgctggacgacgacttccagaccttctaccagtggaaccgcaactaccggtacatggacatgcttaagggcgagtacgacagaaagggctccctgcagcactgcttcaccagcgtggaagagagagaaggcctctggaaagagcgggcctccagaacagagcggtacagaaagcaggccagcaacaagatccgcagcaaccggcagatgagaaacgccagcagcgaagagatcgagacaatcctggataagcggctgagcaacagccggaacgagtaccagaaaagcgagaaagtgatccggcgctacagagtgcaggatgccctgctgtttctgctggccaaaaagaccctgaccgaactggccgatttcgacggcgagaggttcaaactgaaagaaatcatgcccgacgccgagaagggaatcctgagcgagatcatgcccatgagcttcaccttcgagaaaggcggcaagaagtacaccatcaccagcgagggcatgaagctgaagaactacggcgacttctttgtgctggctagcgacaagaggatcggcaacctgctggaactcgtgggcagcgacatcgtgtccaaagaggattagtaa

SEQ ID NO: 165 - DNA, 3063 bp, Artificial Sequence
  Chemically Synthesized
atggactacaaagaccatgacggtgattataaagatcatgacatcgattacaaggatgacgatgacaagggcggagggatcactctcggcaaggacgagctgtaaggaggcaacatccccgctctggtggaaaaccagaagaagtactttggcacctacagcgtgatggccatgctgaacgctcagaccgtgctggaccacatccagaaggtggccgatattgagggcgagcagaacgagaacaacgagaatctgtggtttcaccccgtgatgagccacctgtacaacgccaagaacggctacgacaagcagcccgagaaaaccatgttcatcatcgagcggctgcagagctacttcccattcctgaagatcatggccgagaaccagagagagtacagcaacggcaagtacaagcagaaccgcgtggaagtgaacagcaacgacatcttcgaggtgctgaagcgcgccttcggcgtgctgaagatgtacagggacctgaccaaccactacaagacctacgaggaaaagctgaacgacggctgcgagttcctgaccagcacagagcaacctctgagcggcatgatcaacaactactacacagtggccctgcggaacatgaacgagagatacggctacaagacagaggacctggccttcatccaggacaagcggttcaagttcgtgaaggacgcctacggcaagaaaaagtcccaagtgaataccggattcttcctgagcctgcaggactacaacggcgacacacagaagaagctgcacctgagcggagtgggaatcgccctgctgatctgcctgttcctggacaagcagtacatcaacatctttctgagcaggctgcccatcttctccagctacaatgcccagagcgaggaacggcggatcatcatcagatccttcggcatcaacagcatcaagctgcccaaggaccggatccacagcgagaagtccaacaagagcgtggccatggatatgctcaacgaagtgaagcggtgccccgacgagctgttcacaacactgtctgccgagaagcagtcccggttcagaatcatcagcgacgaccacaatgaagtgctgatgaagcggagcagcgacagattcgtgcctctgctgctgcagtatatcgattacggcaagctgttcgaccacatcaggttccacgtgaacatgggcaagctgagatacctgctgaaggccgacaagacctgcatcgacggccagaccagagtcagagtgatcgagcagcccctgaacggcttcggcagactggaagaggccgagacaatgcggaagcaagagaacggcaccttcggcaacagcggcatccggatcagagacttcgagaacatgaagcgggacgacgccaatcctgccaactatccctacatcgtggacacctacacacactacatcctggaaaacaacaaggtcgagatgtttatcaacgacaaagaggacagcgccccactgctgcccgtgatcgaggatgatagatacgtggtcaagacaatccccagctgccggatgagcaccctggaaattccagccatggccttccacatgtttctgttcggcagcaagaaaaccgagaagctgatcgtggacgtgcacaaccggtacaagagactgttccaggccatgcagaaagaagaagtgaccgccgagaatatcgccagcttcggaatcgccgagagcgacctgcctcagaagatcctggatctgatcagcggcaatgcccacggcaaggatgtggacgccttcatcagactgaccgtggacgacatgctgaccgacaccgagcggagaatcaagagattcaaggacgaccggaagtccattcggagcgccgacaacaagatgggaaagagaggcttcaagcagatctccacaggcaagctggccgacttcctggccaaggacatcgtgctgtttcagcccagcgtgaacgatggcgagaacaagatcaccggcctgaactaccggatcatgcagagcgccattgccgtgtacgatagcggcgacgattacgaggccaagcagcagttcaagctgatgttcgagaaggcccggctgatcggcaagggcacaacagagcctcatccatttctgtacaaggtgttcgcccgcagcatccccgccaatgccgtcgagttctacgagcgctacctgatcgagcggaagttctacctgaccggcctgtccaacgagatcaagaaaggcaacagagtggatgtgcccttcatccggcgggaccagaacaagtggaaaacacccgccatgaagaccctgggcagaatctacagcgaggatctgcccgtggaactgcccagacagatgttcgacaatgagatcaagtcccacctgaagtccctgccacagatggaaggcatcgacttcaacaatgccaacgtgacctatctgatcgccgagtacatgaagagagtgctggacgacgacttccagaccttctaccagtggaaccgcaactaccggtacatggacatgcttaagggcgagtacgacagaaagggctccctgcagcactgcttcaccagcgtggaagagagagaaggcctctggaaagagcgggcctccagaacagagcggtacagaaagcaggccagcaacaagatccgcagcaaccggcagatgagaaacgccagcagcgaagagatcgagacaatcctggataagcggctgagcaacagccggaacgagtaccagaaaagcgagaaagtgatccggcgctacagagtgcaggatgccctgctgtttctgctggccaaaaagaccctgaccgaactggccgatttcgacggcgagaggttcaaactgaaagaaatcatgcccgacgccgagaagggaatcctgagcgagatcatgcccatgagcttcaccttcgagaaaggcggcaagaagtacaccatcaccagcgagggcatgaagctgaagaactacggcgacttctttgtgctggctagcgacaagaggatcggcaacctgctggaactcgtgggcagcgacatcgtgtccaaagaggattagtaa

SEQ ID NO: 166 - DNA, 3045 bp, Artificial Sequence
  Chemically Synthesized
atggactacaaagaccatgacggtgattataaagatcatgacatcgattacaaggatgacgatgacaagggcggatccaaattataaggaggcaacatccccgctctggtggaaaaccagaagaagtactttggcacctacagcgtgatggccatgctgaacgctcagaccgtgctggaccacatccagaaggtggccgatattgagggcgagcagaacgagaacaacgagaatctgtggtttcaccccgtgatgagccacctgtacaacgccaagaacggctacgacaagcagcccgagaaaaccatgttcatcatcgagcggctgcagagctacttcccattcctgaagatcatggccgagaaccagagagagtacagcaacggcaagtacaagcagaaccgcgtggaagtgaacagcaacgacatcttcgaggtgctgaagcgcgccttcggcgtgctgaagatgtacagggacctgaccaaccactacaagacctacgaggaaaagctgaacgacggctgcgagttcctgaccagcacagagcaacctctgagcggcatgatcaacaactactacacagtggccctgcggaacatgaacgagagatacggctacaagacagaggacctggccttcatccaggacaagcggttcaagttcgtgaaggacgcctacggcaagaaaaagtcccaagtgaataccggattcttcctgagcctgcaggactacaacggcgacacacagaagaagctgcacctgagcggagtgggaatcgccctgctgatctgcctgttcctggacaagcagtacatcaacatctttctgagcaggctgcccatcttctccagctacaatgcccagagcgaggaacggcggatcatcatcagatccttcggcatcaacagcatcaagctgcccaaggaccggatccacagcgagaagtccaacaagagcgtggccatggatatgctcaacgaagtgaagcggtgccccgacgagctgttcacaacactgtctgccgagaagcagtcccggttcagaatcatcagcgacgaccacaatgaagtgctgatgaagcggagcagcgacagattcgtgcctctgctgctgcagtatatcgattacggcaagctgttcgaccacatcaggttccacgtgaacatgggcaagctgagatacctgctgaaggccgacaagacctgcatcgacggccagaccagagtcagagtgatcgagcagcccctgaacggcttcggcagactggaagaggccgagacaatgcggaagcaagagaacggcaccttcggcaacagcggcatccggatcagagacttcgagaacatgaagcgggacgacgccaatcctgccaactatccctacatcgtggacacctacacacactacatcctggaaaacaacaaggtcgagatgtttatcaacgacaaagaggacagcgccccactgctgcccgtgatcgaggatgatagatacgtggtcaagacaatccccagctgccggatgagcaccctggaaattccagccatggccttccacatgtttctgttcggcagcaagaaaaccgagaagctgatcgtggacgtgcacaaccggtacaagagactgttccaggccatgcagaaagaagaagtgaccgccgagaatatcgccagcttcggaatcgccgagagcgacctgcctcagaagatcctggatctgatcagcggcaatgcccacggcaaggatgtggacgccttcatcagactgaccgtggacgacatgctgaccgacaccgagcggagaatcaagagattcaaggacgaccggaagtccattcggagcgccgacaacaagatgggaaagagaggcttcaagcagatctccacaggcaagctggccgacttcctggccaaggacatcgtgctgtttcagcccagcgtgaacgatggcgagaacaagatcaccggcctgaactaccggatcatgcagagcgccattgccgtgtacgatagcggcgacgattacgaggccaagcagcagttcaagctgatgttcgagaaggcccggctgatcggcaagggcacaacagagcctcatccatttctgtacaaggtgttcgcccgcagcatccccgccaatgccgtcgagttctacgagcgctacctgatcgagcggaagttctacctgaccggcctgtccaacgagatcaagaaaggcaacagagtggatgtgcccttcatccggcgggaccagaacaagtggaaaacacccgccatgaagaccctgggcagaatctacagcgaggatctgcccgtggaactgcccagacagatgttcgacaatgagatcaagtcccacctgaagtccctgccacagatggaaggcatcgacttcaacaatgccaacgtgacctatctgatcgccgagtacatgaagagagtgctggacgacgacttccagaccttctaccagtggaaccgcaactaccggtacatggacatgcttaagggcgagtacgacagaaagggctccctgcagcactgcttcaccagcgtggaagagagagaaggcctctggaaagagcgggcctccagaacagagcggtacagaaagcaggccagcaacaagatccgcagcaaccggcagatgagaaacgccagcagcgaagagatcgagacaatcctggataagcggctgagcaacagccggaacgagtaccagaaaagcgagaaagtgatccggcgctacagagtgcaggatgccctgctgtttctgctggccaaaaagaccctgaccgaactggccgatttcgacggcgagaggttcaaactgaaagaaatcatgcccgacgccgagaagggaatcctgagcgagatcatgcccatgagcttcaccttcgagaaaggcggcaagaagtacaccatcaccagcgagggcatgaagctgaagaactacggcgacttctttgtgctggctagcgacaagaggatcggcaacctgctggaactcgtgggcagcgacatcgtgtccaaagaggattagtaa

SEQ ID NO: 167 - DNA, 79 bp, Artificial Sequence
  Chemically Synthesized
ttaaaggtttataccttcccaggtaacaaaccaaccaactttcgatctcttgtagatctgttctctaaacgaactttaa

SEQ ID NO: 168 - DNA, 30 bp, Artificial Sequence
  Chemically Synthesized
aaaggtttataccttcccaggtaacaaacc

SEQ ID NO: 169 - DNA, 30 bp, Artificial Sequence
  Chemically Synthesized
gtttataccttcccaggtaacaaaccaacc

SEQ ID NO: 170 - DNA, 30 bp, Artificial Sequence
  Chemically Synthesized
ccttcccaggtaacaaaccaaccaactttc

SEQ ID NO: 171 - DNA, 30 bp, Artificial Sequence
  Chemically Synthesized
caggtaacaaaccaaccaactttcgatctc

SEQ ID NO: 172 - DNA, 30 bp, Artificial Sequence
  Chemically Synthesized
aaccaaccaactttcgatctcttgtagatc

SEQ ID NO: 173 - DNA, 30 bp, Artificial Sequence
  Chemically Synthesized
caactttcgatctcttgtagatctgttctc

SEQ ID NO: 174 - DNA, 30 bp, Artificial Sequence
  Chemically Synthesized
ttcgatctcttgtagatctgttctctaaac

SEQ ID NO: 175 - DNA, 81 bp, Artificial Sequence
  Chemically Synthesized
gtaacattagggaggacttgaaagagccaccacattttcaccaggccacgcggagtacgatcgagtgtacagtgaacaatg

SEQ ID NO: 176 - DNA, 30 bp, Artificial Sequence
  Chemically Synthesized
acattagggaggacttgaaagagccaccac

SEQ ID NO: 177 - DNA, 30 bp, Artificial Sequence
  Chemically Synthesized
gggaggacttgaaagagccaccacattttc

SEQ ID NO: 178 - DNA, 29 bp, Artificial Sequence
  Chemically Synthesized
ttgaaagagccaccacattttcaccaggc

SEQ ID NO: 179 - DNA, 29 bp, Artificial Sequence
  Chemically Synthesized
agagccaccacattttcaccaggccacgc

SEQ ID NO: 180 - DNA, 29 bp, Artificial Sequence
  Chemically Synthesized
attttcaccaggccacgcggagtacgatc

SEQ ID NO: 181 - DNA, 30 bp, Artificial Sequence
  Chemically Synthesized
acgcggagtacgatcgagtgtacagtgaac

SEQ ID NO: 182 - DNA, 79 bp, Artificial Sequence
  Chemically Synthesized
gattgcgagcgatttgcgtgcgtgcatcccgcttcactgatctcttgttagatcttttcataatctaaactttataaaa

SEQ ID NO: 183 - DNA, 79 bp, Artificial Sequence
  Chemically Synthesized
acattagggaggacttgaaagagccaccacattttcaccgaggccacgcggagtacgatcgagtgtacagtgaacaatg

SEQ ID NO: 184 - DNA, 40 bp, Artificial Sequence
  Chemically Synthesized
atcgtgctacaacttcctcaaggaacaacattgccaaaag

SEQ ID NO: 185 - DNA, 36 bp, Artificial Sequence
  Chemically Synthesized
cgcgcattggcatggaagtcacaccttcgggaacgt

SEQ ID NO: 186 - DNA, 30 bp, Artificial Sequence
  Chemically Synthesized
gctacaacttcctcaaggaacaacattgcc

SEQ ID NO: 187 - DNA, 30 bp, Artificial Sequence
  Chemically Synthesized
cattggcatggaagtcacaccttcgggaac

SEQ ID NO: 188 - DNA, 110 bp, Artificial Sequence
  Chemically Synthesized
attaaaggtttataccttcccaggtaacaaaccaaccaactttcgatctcttgtagatctgttctctaaacgaactttaaaaaggtttataccttcccaggtaacaaacc

SEQ ID NO: 189 - DNA, 30 bp, Artificial Sequence
  Chemically Synthesized
tttccaaatatggaagggtccattgtttgg

SEQ ID NO: 190 - DNA, 30 bp, Artificial Sequence
  Chemically Synthesized
caaatatggaagggtccattgtttggttgg

SEQ ID NO: 191 - DNA, 30 bp, Artificial Sequence
  Chemically Synthesized
ggaagggtccattgtttggttggttgaaag

SEQ ID NO: 192 - DNA, 30 bp, Artificial Sequence
  Chemically Synthesized
gtccattgtttggttggttgaaagctagag

SEQ ID NO: 193 - DNA, 30 bp, Artificial Sequence
  Chemically Synthesized
ttggttggttgaaagctagagaacatctag

SEQ ID NO: 194 - DNA, 30 bp, Artificial Sequence
  Chemically Synthesized
gttgaaagctagagaacatctagacaagag

SEQ ID NO: 195 - DNA, 30 bp, Artificial Sequence
  Chemically Synthesized
aagctagagaacatctagacaagagatttg

SEQ ID NO: 196 - DNA, 30 bp, Artificial Sequence
  Chemically Synthesized
tgtaatccctcctgaactttctcggtggtg

SEQ ID NO: 197 - DNA, 30 bp, Artificial Sequence
  Chemically Synthesized
ccctcctgaactttctcggtggtgtaaaag

SEQ ID NO: 198 - DNA, 30 bp, Artificial Sequence
  Chemically Synthesized
aactttctcggtggtgtaaaagtggctccg

SEQ ID NO: 199 - DNA, 30 bp, Artificial Sequence
  Chemically Synthesized
tctcggtggtgtaaaagtggctccggtgcg

SEQ ID NO: 200 - DNA, 30 bp, Artificial Sequence
  Chemically Synthesized
taaaagtggctccggtgcgcctcatgctag

SEQ ID NO: 201 - DNA, 30 bp, Artificial Sequence
  Chemically Synthesized
tgcgcctcatgctagctcacatgtcacttg

SEQ ID NO: 202 - DNA, 30 bp, Artificial Sequence
  Chemically Synthesized
ggtttgttacctgggaaggtataaaccttt

SEQ ID NO: 203 - DNA, 30 bp, Artificial Sequence
  Chemically Synthesized
ggttggtttgttacctgggaaggtataaac

SEQ ID NO: 204 - DNA, 30 bp, Artificial Sequence
  Chemically Synthesized
gaaagttggttggtttgttacctgggaagg

SEQ ID NO: 205 - DNA, 30 bp, Artificial Sequence
  Chemically Synthesized
gagatcgaaagttggttggtttgttacctg

SEQ ID NO: 206 - DNA, 30 bp, Artificial Sequence
  Chemically Synthesized
gatctacaagagatcgaaagttggttggtt

SEQ ID NO: 207 - DNA, 30 bp, Artificial Sequence
  Chemically Synthesized
gagaacagatctacaagagatcgaaagttg

SEQ ID NO: 208 - DNA, 30 bp, Artificial Sequence
  Chemically Synthesized
gtttagagaacagatctacaagagatcgaa

SEQ ID NO: 209 - DNA, 30 bp, Artificial Sequence
  Chemically Synthesized
gcgggatgcacgcacgcaaatcgctcgcaa

SEQ ID NO: 210 - DNA, 30 bp, Artificial Sequence
  Chemically Synthesized
gtgaagcgggatgcacgcacgcaaatcgct

SEQ ID NO: 211 - DNA, 30 bp, Artificial Sequence
  Chemically Synthesized
gagatcagtgaagcgggatgcacgcacgca

SEQ ID NO: 212 - DNA, 30 bp, Artificial Sequence
  Chemically Synthesized
gatctaacaagagatcagtgaagcgggatg

SEQ ID NO: 213 - DNA, 30 bp, Artificial Sequence
  Chemically Synthesized
gaaaagatctaacaagagatcagtgaagcg

SEQ ID NO: 214 - DNA, 30 bp, Artificial Sequence
  Chemically Synthesized
gattatgaaaagatctaacaagagatcagt

SEQ ID NO: 215 - DNA, 30 bp, Artificial Sequence
  Chemically Synthesized
gtttagattatgaaaagatctaacaagaga

SEQ ID NO: 216 - DNA, 30 bp, Artificial Sequence
  Chemically Synthesized
gtggtggctctttcaagtcctccctaatgt

SEQ ID NO: 217 - DNA, 30 bp, Artificial Sequence
  Chemically Synthesized
gaaaatgtggtggctctttcaagtcctccc

SEQ ID NO: 218 - DNA, 30 bp, Artificial Sequence
  Chemically Synthesized
gcctcggtgaaaatgtggtggctctttcaa

SEQ ID NO: 219 - DNA, 30 bp, Artificial Sequence
  Chemically Synthesized
gcgtggcctcggtgaaaatgtggtggctct

SEQ ID NO: 220 - DNA, 30 bp, Artificial Sequence
  Chemically Synthesized
gatcgtactccgcgtggcctcggtgaaaat

SEQ ID NO: 221 - DNA, 30 bp, Artificial Sequence
  Chemically Synthesized
gtacactcgatcgtactccgcgtggcctcg

SEQ ID NO: 222 - DNA, 30 bp, Artificial Sequence
  Chemically Synthesized
gttcactgtacactcgatcgtactccgcgt

SEQ ID NO: 223 - DNA, 30 bp, Artificial Sequence
  Chemically Synthesized
ggcaatgttgttccttgaggaagttgtagc

SEQ ID NO: 224 - DNA, 30 bp, Artificial Sequence
  Chemically Synthesized
gttcccgaaggtgtgacttccatgccaatg

SEQ ID NO: 225 - DNA, 60 bp, Artificial Sequence
  Chemically Synthesized
gtgttggtaatgaaacgaaaacgggactctagcatacttactgacagccagacagcgacc

SEQ ID NO: 226 - DNA, 60 bp, Artificial Sequence; identical to SEQ ID NO: 225
  Chemically Synthesized

SEQ ID NO: 227 - DNA, 60 bp, Artificial Sequence
  Chemically Synthesized
gtgttggtgatgaaacggaaacgggactctagcatacttactgacagtcagacagcgacc

SEQ ID NO: 228 - DNA, 60 bp, Artificial Sequence; identical to SEQ ID NO: 225
  Chemically Synthesized

SEQ ID NO: 229 - DNA, 60 bp, Artificial Sequence
  Chemically Synthesized
ggacggatcaagaaagaagagttctctgagatcatgaagatctgttccaccattgaagaa

SEQ ID NO: 230 - DNA, 60 bp, Artificial Sequence
  Chemically Synthesized
ggacggattaagaaggaagagttctctgagatcatgaagatctgttccaccattgaagaa

SEQ ID NO: 231 - DNA, 60 bp, Artificial Sequence
  Chemically Synthesized
ggaaggattaagaaagaagagtttgctgagatcatgaagatctgttccaccattgaagag

SEQ ID NO: 232 - DNA, 60 bp, Artificial Sequence
  Chemically Synthesized
ggacggattaagaaagaggagttcgctgagatcatgaagatctgttccaccattgaagag

SEQ ID NO: 233 - DNA, 61 bp, Artificial Sequence
  Chemically Synthesized
aatcgaggagtgcctgattaatgatccctgggttttgcttaatgcatcttggttcaactcc

SEQ ID NO: 234 - DNA, 61 bp, Artificial Sequence
  Chemically Synthesized
aattgaggagtgcctgattaatgatccctgggttttgctcaatgcatcttggttcaactcc

SEQ ID NO: 235 - DNA, 61 bp, Artificial Sequence; identical to SEQ ID NO: 233
  Chemically Synthesized

SEQ ID NO: 236 - DNA, 61 bp, Artificial Sequence
  Chemically Synthesized
aattgaggagtgcctgattaatgatccctgggttttgcttaatgcgtcttggttcaactcc

SEQ ID NO: 237 - DNA, 60 bp, Artificial Sequence
  Chemically Synthesized
ttgacatgagtaatgaagggtcttatttcttcggagacaatgcagaggagtatgacagtt

SEQ ID NO: 238 - DNA, 60 bp, Artificial Sequence
  Chemically Synthesized
ttgatatgagtaatgaaggatcttatttcttcggagacaatgcagaagagtacgacaatt

SEQ ID NO: 239 - DNA, 60 bp, Artificial Sequence
  Chemically Synthesized
ttgacatgaataatgaaggatcttatttcttcggagacaatgcagaggagtatgacaatt

SEQ ID NO: 240 - DNA, 60 bp, Artificial Sequence
  Chemically Synthesized
ttgacatgagtaatgaaggatcttatttcttcggagacaatgcagaggagtacgacaatt

SEQ ID NO: 241 - DNA, 60 bp, Artificial Sequence
  Chemically Synthesized
ttctatcatcccgtcaggccccctcaaagccgagatcgcgcagagactggaaagtgtctt

SEQ ID NO: 242 - DNA, 60 bp, Artificial Sequence
  Chemically Synthesized
ctctatcgttccatcaggccccctcaaagccgagatcgcgcagagacttgaagatgtctt

SEQ ID NO: 243 - DNA, 60 bp, Artificial Sequence
  Chemically Synthesized
ctctatcattccatcaggccccctcaaagccgagatcgcacagagacttgaggatgtttt

SEQ ID NO: 244 - DNA, 60 bp, Artificial Sequence
  Chemically Synthesized
ctctatcgtcccgtcaggccccctcaaagccgagatcgcacagagacttgaagatgtctt

SEQ ID NO: 245 - DNA, 30 bp, Artificial Sequence
  Chemically Synthesized
gctgtcagtaagtatgctagagtcccgttt

SEQ ID NO: 246 - DNA, 30 bp, Artificial Sequence
  Chemically Synthesized
cttcaatggtggaacagatcttcatgatct

SEQ ID NO: 247 - DNA, 30 bp, Artificial Sequence
  Chemically Synthesized
gcaaaacccagggatcattaatcaggcact

SEQ ID NO: 248 - DNA, 30 bp, Artificial Sequence
  Chemically Synthesized
tctgcattgtctccgaagaaataagaccct

SEQ ID NO: 249 - DNA, 30 bp, Artificial Sequence
  Chemically Synthesized
ctgcgcgatctcggctttgagggggcctga

SEQ ID NO: 250 - DNA, 30 bp, Artificial Sequence
  Chemically Synthesized
aaacgggactctagcatacttactgacagc

SEQ ID NO: 251 - DNA, 30 bp, Artificial Sequence
  Chemically Synthesized
gagatcatgaagatctgttccaccattgaa

SEQ ID NO: 252 - DNA, 30 bp, Artificial Sequence
  Chemically Synthesized
gaggagtgcctgattaatgatccctgggtt

SEQ ID NO: 253 - DNA, 30 bp, Artificial Sequence
  Chemically Synthesized
aggatcttatttcttcggagacaatgcaga

SEQ ID NO: 254 - DNA, 30 bp, Artificial Sequence
  Chemically Synthesized
tcaggccccctcaaagccgagatcgcgcag

SEQ ID NO: 255 - DNA, 22 bp, Artificial Sequence
  Chemically Synthesized
gtcagtaagtatgctagagtcc

SEQ ID NO: 256 - DNA, 22 bp, Artificial Sequence
  Chemically Synthesized
ttcaatggtggaacagatcttc

SEQ ID NO: 257 - DNA, 22 bp, Artificial Sequence
  Chemically Synthesized
acccagggatcattaatcaggc

SEQ ID NO: 258 - DNA, 22 bp, Artificial Sequence
  Chemically Synthesized
tctgcattgtctccgaagaaat

SEQ ID NO: 259 - DNA, 22 bp, Artificial Sequence
  Chemically Synthesized
gcgatctcggctttgagggggc

SEQ ID NO: 260 - DNA, 22 bp, Artificial Sequence
  Chemically Synthesized
ggactctagcatacttactgac

SEQ ID NO: 261 - DNA, 22 bp, Artificial Sequence
  Chemically Synthesized
gaagatctgttccaccattgaa

SEQ ID NO: 262 - DNA, 22 bp, Artificial Sequence
  Chemically Synthesized
gcctgattaatgatccctgggt

SEQ ID NO: 263 - DNA, 22 bp, Artificial Sequence
  Chemically Synthesized
atttcttcggagacaatgcaga

SEQ ID NO: 264 - DNA, 22 bp, Artificial Sequence
  Chemically Synthesized
gccccctcaaagccgagatcgc

SEQ ID NO: 265 - DNA, 34 bp, Artificial Sequence
  Chemically Synthesized
gttggaactgctcattttggagggtaatcacaac

SEQ ID NO: 266 - DNA, 36 bp, Artificial Sequence
  Chemically Synthesized
gttgcatctgccttctttttgaaaggtaaaaacaac

SEQ ID NO: 267 - DNA, 36 bp, Artificial Sequence
  Chemically Synthesized
gttgtggaaggtccagttttgaggggctattacaac

SEQ ID NO: 268 - DNA, 36 bp, Artificial Sequence
  Chemically Synthesized
gttgtggaaggtccagctttgaggggctattacaac

SEQ ID NO: 269 - DNA, 36 bp, Artificial Sequence
  Chemically Synthesized
gttgtggaaggtccagatttgaggggctattacaac

SEQ ID NO: 270 - DNA, 36 bp, Artificial Sequence
  Chemically Synthesized
gttgtggaaggtccaggtttgaggggctattacaac

SEQ ID NO: 271 - DNA, 36 bp, Artificial Sequence
  Chemically Synthesized
gttgtggaaggtccagtcttgaggggctattacaac

SEQ ID NO: 272 - DNA, 36 bp, Artificial Sequence
  Chemically Synthesized
gttgtggaaggtccagtattgaggggctattacaac

SEQ ID NO: 273 - DNA, 36 bp, Artificial Sequence
  Chemically Synthesized
gttgtggaaggtccagtgttgaggggctattacaac

SEQ ID NO: 274 - DNA, 36 bp, Artificial Sequence
  Chemically Synthesized
gttgtggaaggtccagttctgaggggctattacaac

SEQ ID NO: 275 - DNA, 162 bp, Artificial Sequence
  Chemically Synthesized
gagatcgaaagttggttggtttgttacctggttgtggaaggtccagtcttgaggggctattacaacgttcccgaaggtgtgacttccatgccaatggttgtggaaggtccagctttgaggggctattacaacgcgtggcctcggtgaaaatgtggtggctct

SEQ ID NO: 276 - DNA, 294 bp, Artificial Sequence
  Chemically Synthesized
gctgtcagtaagtatgctagagtcccgtttgttgtggaaggtccagtcttgaggggctattacaaccttcaatggtggaacagatcttcatgatctgttgtggaaggtccagctttgaggggctattacaacgcaaaacccagggatcattaatcaggcactgttgtggaaggtccagtgttgaggggctattacaactctgcattgtctccgaagaaataagaccctgttgtggaaggtccaggtttgaggggctattacaacctgcgcgatctcggctttgagggggcctga

SEQ ID NO: 277 - DNA, 294 bp, Artificial Sequence
  Chemically Synthesized
gagatcatgaagatctgttccaccattgaagttgtggaaggtccagtcttgaggggctattacaacaaacgggactctagcatacttactgacagcgttgtggaaggtccagctttgaggggctattacaacgaggagtgcctgattaatgatccctgggttgttgtggaaggtccagtgttgaggggctattacaacaggatcttatttcttcggagacaatgcagagttgtggaaggtccaggtttgaggggctattacaactcaggccccctcaaagccgagatcgcgcag

SEQ ID NO: 278 - DNA, 273 bp, Artificial Sequence
  Chemically Synthesized
gaacccctaccaactggtcggggtttgaaacgtcagtaagtatgctagagtccgaacccctaccaactggtcggggtttgaaacttcaatggtggaacagatcttcgaacccctaccaactggtcggggtttgaaacacccagggatcattaatcaggcgaacccctaccaactggtcggggtttgaaactctgcattgtctccgaagaaatgaacccctaccaactggtcggggtttgaaacgcgatctcggctttgagggggctttttttt

SEQ ID NO: 279 - DNA, 273 bp, Artificial Sequence
  Chemically Synthesized
gaacccctaccaactggtcggggtttgaaacggactctagcatacttactgacgaacccctaccaactggtcggggtttgaaacgaagatctgttccaccattgaagaacccctaccaactggtcggggtttgaaacgcctgattaatgatccctgggtgaacccctaccaactggtcggggtttgaaacatttcttcggagacaatgcagagaacccctaccaactggtcggggtttgaaacgccccctcaaagccgagatcgctttttttt

SEQ ID NO: 280 - DNA, 11479 bp, Artificial Sequence
  Chemically Synthesized
gtcgacggatcgggagatctcccgatcccctatggtgcactctcagtacaatctgctctgatgccgcatagttaagccagtatctgctccctgcttgtgtgttggaggtcgctgagtagtgcgcgagaaaatttaagctacaacaaggcaaggcttgaccgacaattgcatgaagaatctgcttagggttaggcgttttgcgctgcttcgcgatgtacgggccagatatacgcgttgacattgattattgactagttattaatagtaatcaattacggggtcattagttcatagcccatattggagttccgcgttacataacttacggtaaatggcccgcctggctgaccgcccaacgacccccgcccattgacgtcaataatgacgtatgttcccatagtaacgccaatagggactttccattgacgtcaatgggtggagtatttacggtaaactgcccacttggcagtacatcaagtgatcatatgccaagtacgccccctattgacgtcaatgacggtaaatggcccgcctggcattatgcccagtacatgaccttatgggactttcctacttggcagtacatctacgtattagtcatcgctattaccatggtgatgcggttttggcagtacatcaatgggcgtggatagcgtttgactcacggggatttccaagtctccaccccattgacgtcaatgggagtttgttttggcaccaaaatcaacgggactttccaaaatgtcgtaacaactccgccccattgacgcaaatgggcggtaggcgtgtacggtgggaggtctatataagcagcgcgttttgcctgtactggtctctctggttagaccagatctgagcctgggagctctctggctaactagggaacccactgcttaagcctcaataaagcttgccttgagtgcttcaagtagtgtgtgcccgtctgttgtgtgactctggtaactagagatccctcagacccttttagtcagtgtggaaaatctctagagtggcgcccgaacagggacttgaaagcgaaagggaaaccagaggagctctctcgacgcaggactcggcttgctgaagcgcgcacggcaagaggcgaggggcggcgactggtgagtacgccaaaaattttgactagcggaggctagaaggagagagatgggtgcgagagcgtagtattaagcgggggagaattagatcgcgatgggaaaaaattcggttaaggccagggggaaagaaaaaatataaattaaaacatatagtatgggcaagcagggagctagaacgattcgcagttaatcctggcctgttagaaacatcagaaggctgtagacaaatctgggacagctacaaccatcccttcagacaggatcagaagaacttagatcattatataatacagtagcaaccctctattgtgtgcatcaaaggatagagataaaagacaccaaggaagctttagacaagatagaggaagagcaaaacaaaagtaagaccaccgcacacaagcggccgctgatcttcagacctggaggaggagatatgagggacaattggagaagtgaattatataaatataaagtagtaaaaattgaaccattaggagtagcacccaccaaggcaaagagaagagtggtgcagagagaaaaaagagcagtgggaataggagcttgttccttgggttcttgggagcagcaggaagcactatgggcgcagcgtcaatgacgctgacggtacaggccagacaattattgtctggtatagtgcagcagcagaacaatttgctgagggctattgaggcgcaacagcatctgttgcaactcacagtctggggcataagcagctccaggcaagaatcctggctgtggaaagatacctaaaggatcaacagctcctggggatttggggttgctctggaaaactcatttgcaccactgctgtgccttggaatgctagttggagtaataaatctctggaacagatttggaatcacacgacctggatgggtgggacagagaaattaacaattacacaagcttaatacactccttaattgaagaatcgcaaaaccagcaagaaaagaatgaacaagaattattggaattagataaatgggcaagtttgtggaattggtttaacataacaaattggctgtggtatataaaattattcataatgatgtaggaggcttggtaggtttaagaatagtttttgctgtactttctatagtgaatagagttaggcagggatattcaccattatcgtttcagacccacctcccaaccccgaggggacccgacaggcccgaaggaatagaagaagaaggtggagagagagacagagacagatccattcgatagtgaacggatcggcactgcgtgcgccaattctgcagacaaatggcagtattcatccacaattttaaaagaaaaggggggattggggggtacagtgcaggggaaagaatagtagacataatagcaacagacatacaaactaaagaattacaaaaacaaattacaaaattcaaaattttcgggtttattacagggacagcagagatccagtttggttaattaaggtaccgagggcctatttcccatgattccttcatatttgcatatacgatacaaggctgttagagagataattagaattaatttgactgtaaacacaaagatattagtacaaatacgtgacgtagaaagtaataatttcttgggtagtttgcagttttaaaattatgttttaaaatggactatcatatgcttaccgtaacttgaaagtatttcgatttcttggctttatatatcttgtggaaaggacgaaacaccggagacgctgggaccgtctcagttgtggaaggtccagtttgaggggctattacaactttttttgaattcgctagctaggtcttgaaaggagtgggaattggctccggtgcccgtcagtgggcagagcgcacatcgcccacagtccccgagaagttggggggaggggtcggcaattgatccggtgcctgagaaggtggcgcggggtaaactgggaaagtgatgtcgtgtactggctccgcctttttcccgagggtgggggagaaccgtatataagtgcagtagtcgccgtgaacgttctttttcgcaacgggtttgccgccagaacacaggctcgagcgccaccatggactacaagaccatgacggtgattataaagatcatgacatcgattacaaggatgacgatgacaagggatcccttcaactgcctccacttgaaagactgacactgggtagttccaacatccccgctctggtggaaaaccagaagaagtactttggcacctacagcgtgatggccatgctgaacgctcagaccgtgctggaccacatccagaaggtggccgatattgagggcgagcagaacgagaacaacgagaatctgtggtttcaccccgtgatgagccacctgtacaacgccaagaacggctacgacaagcagcccgagaaaaccatgttcatcatcgagcggctgcagagctacttcccattcctgaagatcatggccgagaaccagagagagtacagcaacggcaagtacaagcagaaccgcgtggaagtgaacagcaacgacatcttcgaggtgctgaagcgcgccttcggcgtgctgaagatgtacagggacctgaccaaccactacaagacctacgaggaaaagctgaacgacggctgcgagttcctgaccagcacagagcaacctctgagcggcatgatcaacaactactacacagtggccctgcggaacatgaacgagagatacggctacaagacagaggacctggccttcatccaggacaagcggttcaagttcgtgaaggacgcctacggcaagaaaaagtcccaagtgaataccggattcttcctgagcctgcaggactacaacggcgacacacagaagaagctgcacctgagcggagtgggaatcgccctgctgatctgcctgttcctggacaagcagtacatcaacatctttctgagcaggctgcccatcttctccagctacaatgcccagagcgaggaacggcggatcatcatcagatccttcggcatcaacagcatcaagctgcccaaggaccggatccacagcgagaagtccaacaagagcgtggccatggatatgctcaacgaagtgaagcggtgccccgacgagctgttcacaacactgtctgccgagaagcagtcccggttcagaatcatcagcgacgaccacaatgaagtgctgatgaagcggagcagcgacagattcgtgcctctgctgctgcagtatatcgattacggcaagctgttcgaccacatcaggttccacgtgaacatgggcaagctgagatacctgctgaaggccgacaagacctgcatcgacggccagaccagagtcagagtgatcgagcagcccctgaacggcttcggcagactggaagaggccgagacaatgcggaagcaagagaacggcaccttcggcaacagcggcatccggatcagagacttcgagaacatgaagcgggacgacgccaatcctgccaactatccctacatcgtggacacctacacacactacatcctggaaaacaacaaggtcgagatgtttatcaacgacaaagaggacagcgccccactgctgcccgtgatcgaggatgatagatacgtggtcaagacaatccccagctgccggatgagcaccctggaaattccagccatggccttccacatgtttctgttcggcagcaagaaaaccgagaagctgatcgtggacgtgcacaaccggtacaagagactgttccaggccatgcagaaagaagaagtgaccgccgagaatatcgccagcttcggaatcgccgagagcgacctgcctcagaagatcctggatctgatcagcggcaatgcccacggcaaggatgtggacgccttcatcagactgaccgtggacgacatgctgaccgacaccgagcggagaatcaagagattcaaggacgaccggaagtccattcggagcgccgacaacaagatgggaaagagaggcttcaagcagatctccacaggcaagctggccgacttcctggccaaggacatcgtgctgtttcagcccagcgtgaacgatggcgagaacaagatcaccggcctgaactaccggatcatgcagagcgccattgccgtgtacgatagcggcgacgattacgaggccaagcagcagttcaagctgatgttcgagaaggcccggctgatcggcaagggcacaacagagcctcatccatttctgtacaaggtgttcgcccgcagcatccccgccaatgccgtcgagttctacgagcgctacctgatcgagcggaagttctacctgaccggcctgtccaacgagatcaagaaaggcaacagagtggatgtgcccttcatccggcgggaccagaacaagtggaaaacacccgccatgaagaccctgggcagaatctacagcgaggatctgcccgtggaactgcccagacagatgttcgacaatgagatcaagtcccacctgaagtccctgccacagatggaaggcatcgacttcaacaatgccaacgtgacctatctgatcgccgagtacatgaagagagtgctggacgacgacttccagaccttctaccagtggaaccgcaactaccggtacatggacatgcttaagggcgagtacgacagaaagggctccctgcagcactgcttcaccagcgtggaagagagagaaggcctctggaaagagcgggcctccagaacagagcggtacagaaagcaggccagcaacaagatccgcagcaaccggcagatgagaaacgccagcagcgaagagatcgagacaatcctggataagcggctgagcaacagccggaacgagtaccagaaaagcgagaaagtgatccggcgctacagagtgcaggatgccctgctgtttctgctggccaaaaagaccctgaccgaactggccgatttcgacggcgagaggttcaaactgaaagaaatcatgcccgacgccgagaagggaatcctgagcgagatcatgcccatgagcttcaccttcgagaaaggcggcaagaagtacaccatcaccagcgagggcatgaagctgaagaactacggcgacttctttgtgctggctagcgacaagaggatcggcaacctgctggaactcgtgggcagcgacatcgtgtccaaagaggatatcatggaagagttcaacaaatacgaccagtgcaggcccgagatcagctccatcgtgttcaacctggaaaagtgggccttcgacacataccccgagctgtctgccagagtggaccgggaagagaaggtggacttcaagagcatcctgaaaatcctgctgaacaacaagaacatcaacaaagagcagagcgacatcctgcggaagatccggaacgccttcgatcacaacaattaccccgacaaaggcgtggtggaaatcaaggccctgcctgagatcgccatgagcatcaagaaggcctttggggagtacgccatcatgaagtagtaatctagaacgcgttaagtcgacaatcaacctctggattacaaaatttgtgaaagattgactggtattcttaactatgttgctccttttacgctatgtggatacgctgctttaatgcctttgtatcatgctattgcttcccgtatggctttcattttctcctccttgtataaatcctggttgctgtctctttatgaggagttgtggcccgttgtcaggcaacgtggcgtggtgtgcactgtgtttgctgacgcaacccccactggttggggcattgccaccacctgtcagctcctttccgggactttcgctttccccctccctattgccacggcggaactcatcgccgcctgccttgcccgctgctggacaggggctcggctgttgggcactgacaattccgtggtgttgtcggggaaatcatcgtcctttccttggctgctcgcctgtgttgccacctggattctgcgcgggacgtccttctgctacgtcccttcggccctcaatccagcggaccttccttcccgcggcctgctgccggctctgcggcctcttccgcgtcttcgccttcgccctcagacgagtcggatctccctttgggccgcctccccgcgtcgactttaagaccaatgacttacaaggcagctgtagatcttagccactttttaaaagaaaaggggggactggaagggctaattcactcccaacgaagacaagatctgctttttgcttgtactgggtctctctggttagaccagatctgagcctgggagctctctggctaactagggaacccactgcttaagcctcaataaagcttgccttgagtgcttcaagtagtgtgtgcccgtctgttgtgtgactctggtaactagagatccctcagacccttttagtcagtgtggaaaatctctagcagggcccgtttaaacccgctgatcagcctcgactgtgccttctagttgccagccatctgttgtttgcccctcccccgtgccttccttgaccctggaaggtgccctcccactgtcctttcctaataaaatgaggaaattgcatcgcattgtctgagtaggtgtcattctattctggggggtggggtggggcaggacagcaagggggaggattgggaagacaatagcaggcatgctggggatgcggtgggctctatggcttctgaggcggaagaaccagctggggctctagggggtatccccacgcgccctgtagcggcgcattaagcgcggcgggtgtggtggttacgcgcagcgtgaccgctacacttgccagcgccctagcgcccgctcctttcgctttcttcccttcctttctcgccacgttcgccggctttccccgcaagctctaaatcgggggctccctttagggttccgatttagtgctttacggcacctcgaccccaaaaaacttgattagggtgatggttcacgtagtgggccatcgccctgatagacggtttttcgccctttgacgttggagtccacgttctttaatagtggactcttgttccaaactggacaacactcaaccctatctcggtctattcttttgatttataagggattttgccgatttcggcctattggttaaaaaatgagctgatttaacaaaaatttaacgcgaattaattctgtggaatgtgtgtcagttagggtgtggaaagtccccaggctccccagcaggcagaagtatgcaaagatgcatctcaattagtcagcaaccaggtgtggaaagtccccaggctccccagcaggcagaagtatgcaaagcatgcatctcaattagtcagcaaccatagtcccgcccctaactccgcccatcccgcccctaactccgcccagttccgcccattctccgccccatggctgactattttttttatttatgcagaggccgaggccgcctctgcctctgagctattccagaagtagtgaggaggcttttttggaggcctaggcttttgcaaaaagctcccgggagcttgtatatccattttcggatctgatcagcacgtgttgacaattaatcatcggcatagtatatcggatagtataatacgacaaggtgaggaactaaaccatggccaagttgaccagtgccgttccggtgctcaccgcgcgcgacgtcgccggagcggtcgagttctggaccgaccggctcgggttctcccgggacttcgtggaggacgacttcgccggtgtggtccgggacgacgtgacccgttcatcagcgcggtccaggaccaggtggtgccggacaacaccctggcctgggtgtgggtgcgcggcctggacgagctgtacgccgagtggtcggaggtcgtgtccacgaacttccgggacgcctccgggccggccatgaccgagatcggcgagcagccgtgggggcggagttcgccctgcgcgacccggccggcaactgcgtgcacttcgtggccgaggagcaggactgacacgtgctacgagatttcgattccaccgccgccttctatgaaaggttgggcttcggaatcgttttccgggacgccggctggatgatcctccagcgcggggattcatgctggagttcttcgcccaccccaacttgtttattgcagcttataatggttacaaataaagcaatagcatcacaaatttcacaaataaagcatttttttcactgcattctagttgtggtttgtccaaactcatcaatgtatcttatcatgtctgtataccgtcgacctctagcagagcttggcgtaatcatggtcatagctgtttcctgtgtgaaattgttatccgctcacaattccacacaacatacgagccggaagcataaagtgtaaagcctggggtgcctaatgagtgagctaactcacattaattgcgttgcgctcactgcccgctttccagtcgggaaacctgtcgtgccactgcattaatgaatcggccaacgcgcggggagaggcggtttgcgtattgggcgctcttccgcttcctcgctcactgactcgctgcgctcggtcgttcggctgcggcgagcggtatcagctcactcaaaggcggtaatacggttatccacagaatcaggggataacgcaggaagaacatgtgagcaaaaggccagcaaaaggccaggaaccgtaaaaaggccgcgttgctggcgtttttccataggctccgcccccctgacgagcatcacaaaaatcgacgctcaagtcagaggtggcgaaacccgacaggactataaagataccaggcgtttccccctgaagctccctcgtgcgctctcctgttccgaccctgccgcttaccggatacctgtccgcctttctcccttcgggaagcgtggcgctttctcatagctcacgctgtaggtatctcagttcggtgtaggtcgttcgctccaagctgggctgtgtgcacgaaccccccgttcagccgaccgctgcgccttatccggtaactatcgtcttgagtccaacccggtaagacacgacttatcgccactggcagcagccactggtaacaggattagcagagcgaggtatgtaggcggtgctacagagttcttgaagtggtggcctaactacggctacactagaagaacagtatttggttctgcgctctgctgaagccagttaccttcggaaaaagagttggtagctcttgatccggcaaacaaaccaccgctggtagcggtggtttttttgtttgcaagcagcagattacgcgcagaaaaaaaggatctcaagaagatcctttgatcttttctacggggtctgacgctcatggaacgaaaactcacgttaagggattttggtcatgagattatcaaaaaggatcttcacctagatccttttaaattaaaaatgaagttttaaatcaatctaaagtatatatgagtaaacttggtctgacagttaccaatgcttaatcagtgaggcacctatctcagcgatctgtcatttcgttcatccatagttgcctgactccccgtcgtgtagataactacgatacgggagggcttaccatctggccccagtgctgcaatgataccgcgagacccacgctcaccggctccagatttatcagcaataaaccagccagccggaagggccgagcgcagaagtggtcctgcaactttaccgcctccatccagtctattaattgttgccgggaagctagagtaagtagttcgccagttaatagtttgcgcaacgttgttgccattgctacaggcatcgtggtgtcacgctcgtcgtttggtatggcttcattcagctccggttcccaacgatcaaggcgagttacatgacccccatgttgtgcaaaaaagcggttagctccttcggtcctccgatcgttgtcagaagtaagttggccgcagtgttatcactcatggttatggcagcactgcataattctcttactgtcatgccatccgtaagatgcttttctgtgactggtgagtactcaaccaagtcattctgagaatgtgtatgcggcgaccgagttgctcttgcccggcgtcaatacgggataataccgcgccacatagcagaactttaaaagtgctcatcattggaaaacgttcttcggggcgaaaactctcaaggatcttaccgctgttgagatccagttcgatgtaacccactcgtgcacccaactgatctcagcatcttttactttcaccagcgtttctgggtgagcaaaaacaggaaggcaaaatgccgcaaaaaagggaataagggcgacacggaaatgttgaatactcatactcttcctttttcaatattattgaagcatttatcagggttattgtctcatgagcggatacatatttgaatgatttagaaaaataaacaaataggggttccgcgcacatttccccgaaaagtgccacctgac

SEQ ID NO: 281 - DNA, 11560 bp, Artificial Sequence
  Chemically Synthesized
gtcgacggatcgggagatctcccgatcccctatggtgcactctcagtacaatctgctctgatgccgcatagttaagccagtatctgctccctgcttgtgtgttggaggtcgctgagtagtgcgcgagaaaatttaagctacaacaaggcaaggcttgaccgacaattgcatgaagaatctgcttagggttaggcgttttgcgctgcttcgcgatgtacgggccagatatacgcgttgacattgattattgactagttattaatagtaatcaattacggggtcattagttcatagcccatattggagttccgcgttacataacttacggtaaatggcccgcctggctgaccgcccaacgacccccgcccattgacgtcaataatgacgtatgttcccatagtaacgccaatagggactttccattgacgtcaatgggtggagtatttacggtaaactgcccacttggcagtacatcaagtgatcatatgccaagtacgccccctattgacgtcaatgacggtaaatggcccgcctggcattatgcccagtacatgaccttatgggactttcctacttggcagtacatctacgtattagtcatcgctattaccatggtgatgcggttttggcagtacatcaatgggcgtggatagcgtttgactcacggggatttccaagtctccaccccattgacgtcaatgggagtttgttttggcaccaaaatcaacgggactttccaaaatgtcgtaacaactccgccccattgacgcaaatgggcggtaggcgtgtacggtgggaggtctatataagcagcgcgttttgcctgtactggtctctctggttagaccagatctgagcctgggagctctctggctaactagggaacccactgcttaagcctcaataaagcttgccttgagtgcttcaagtagtgtgtgcccgtctgttgtgtgactctggtaactagagatccctcagacccttttagtcagtgtggaaaatctctagagtggcgcccgaacagggacttgaaagcgaaagggaaaccagaggagctctctcgacgcaggactcggcttgctgaagcgcgcacggcaagaggcgaggggcggcgactggtgagtacgccaaaaattttgactagcggaggctagaaggagagagatgggtgcgagagcgtagtattaagcgggggagaattagatcgcgatgggaaaaaattcggttaaggccagggggaaagaaaaaatataaattaaaacatatagtatgggcaagcagggagctagaacgattcgcagttaatcctggcctgttagaaacatcagaaggctgtagacaaatctgggacagctacaaccatcccttcagacaggatcagaagaacttagatcattatataatacagtagcaaccctctattgtgtgcatcaaaggatagagataaaagacaccaaggaagctttagacaagatagaggaagagcaaaacaaaagtaagaccaccgcacacaagcggccgctgatcttcagacctggaggaggagatatgagggacaattggagaagtgaattatataaatataaagtagtaaaaattgaaccattaggagtagcacccaccaaggcaaagagaagagtggtgcagagagaaaaaagagcagtgggaataggagcttgttccttgggttcttgggagcagcaggaagcactatgggcgcagcgtcaatgacgctgacggtacaggccagacaattattgtctggtatagtgcagcagcagaacaatttgctgagggctattgaggcgcaacagcatctgttgcaactcacagtctggggcataagcagctccaggcaagaatcctggctgtggaaagatacctaaaggatcaacagctcctggggatttggggttgctctggaaaactcatttgcaccactgctgtgccttggaatgctagttggagtaataaatctctggaacagatttggaatcacacgacctggatgggtgggacagagaaattaacaattacacaagcttaatacactccttaattgaagaatcgcaaaaccagcaagaaaagaatgaacaagaattattggaattagataaatgggcaagtttgtggaattggtttaacataacaaattggctgtggtatataaaattattcataatgatgtaggaggcttggtaggtttaagaatagtttttgctgtactttctatagtgaatagagttaggcagggatattcaccattatcgtttcagacccacctcccaaccccgaggggacccgacaggcccgaaggaatagaagaagaaggtggagagagagacagagacagatccattcgatagtgaacggatcggcactgcgtgcgccaattctgcagacaaatggcagtattcatccacaattttaaaagaaaaggggggattggggggtacagtgcaggggaaagaatagtagacataatagcaacagacatacaaactaaagaattacaaaaacaaattacaaaattcaaaattttcgggtttattacagggacagcagagatccagtttggttaattaaggtaccgagggcctatttcccatgattccttcatatttgcatatacgatacaaggctgttagagagataattagaattaatttgactgtaaacacaaagatattagtacaaatacgtgacgtagaaagtaataatttcttgggtagtttgcagttttaaaattatgttttaaaatggactatcatatgcttaccgtaacttgaaagtatttcgatttcttggctttatatatcttgtggaaaggacgaaacaccggagacgctgggaccgtctcagttgtggaaggtccagtttgaggggctattacaactttttttgaattcgctagctaggtcttgaaaggagtgggaattggctccggtgcccgtcagtgggcagagcgcacatcgcccacagtccccgagaagttggggggaggggtcggcaattgatccggtgcctgagaaggtggcgcggggtaaactgggaaagtgatgtcgtgtactggctccgcctttttcccgagggtgggggagaaccgtatataagtgcagtagtcgccgtgaacgttctttttcgcaacgggtttgccgccagaacacaggctcgagcgccaccatggactacaagaccatgacggtgattataaagatcatgacatcgattacaaggatgacgatgacaagggcggaaactcaaagaaaaggtcactggaggacaacgaaacggaaatcaaagtctccagagacacctggaacactaagaacatgcggtccctggaaccgccacgaagcaagaaacggatacatggaggcaacatccccgctctggtggaaaaccagaagaagtactttggcacctacagcgtgatggccatgctgaacgctcagaccgtgctggaccacatccagaaggtggccgatattgagggcgagcagaacgagaacaacgagaatctgtggtttcaccccgtgatgagccacctgtacaacgccaagaacggctacgacaagcagcccgagaaaaccatgttcatcatcgagcggctgcagagctacttcccattcctgaagatcatggccgagaaccagagagagtacagcaacggcaagtacaagcagaaccgcgtggaagtgaacagcaacgacatcttcgaggtgctgaagcgcgccttcggcgtgctgaagatgtacagggacctgaccaaccactacaagacctacgaggaaaagctgaacgacggctgcgagttcctgaccagcacagagcaacctctgagcggcatgatcaacaactactacacagtggccctgcggaacatgaacgagagatacggctacaagacagaggacctggccttcatccaggacaagcggttcaagttcgtgaaggacgcctacggcaagaaaaagtcccaagtgaataccggattcttcctgagcctgcaggactacaacggcgacacacagaagaagctgcacctgagcggagtgggaatcgccctgctgatctgcctgttcctggacaagcagtacatcaacatctttctgagcaggctgcccatcttctccagctacaatgcccagagcgaggaacggcggatcatcatcagatccttcggcatcaacagcatcaagctgcccaaggaccggatccacagcgagaagtccaacaagagcgtggccatggatatgctcaacgaagtgaagcggtgccccgacgagctgttcacaacactgtctgccgagaagcagtcccggttcagaatcatcagcgacgaccacaatgaagtgctgatgaagcggagcagcgacagattcgtgcctctgctgctgcagtatatcgattacggcaagctgttcgaccacatcaggttccacgtgaacatgggcaagctgagatacctgctgaaggccgacaagacctgcatcgacggccagaccagagtcagagtgatcgagcagcccctgaacggcttcggcagactggaagaggccgagacaatgcggaagcaagagaacggcaccttcggcaacagcggcatccggatcagagacttcgagaacatgaagcgggacgacgccaatcctgccaactatccctacatcgtggacacctacacacactacatcctggaaaacaacaaggtcgagatgtttatcaacgacaaagaggacagcgccccactgctgcccgtgatcgaggatgatagatacgtggtcaagacaatccccagctgccggatgagcaccctggaaattccagccatggccttccacatgtttctgttcggcagcaagaaaaccgagaagctgatcgtggacgtgcacaaccggtacaagagactgttccaggccatgcagaaagaagaagtgaccgccgagaatatcgccagcttcggaatcgccgagagcgacctgcctcagaagatcctggatctgatcagcggcaatgcccacggcaaggatgtggacgccttcatcagactgaccgtggacgacatgctgaccgacaccgagcggagaatcaagagattcaaggacgaccggaagtccattcggagcgccgacaacaagatgggaaagagaggcttcaagcagatctccacaggcaagctggccgacttcctggccaaggacatcgtgctgtttcagcccagcgtgaacgatggcgagaacaagatcaccggcctgaactaccggatcatgcagagcgccattgccgtgtacgatagcggcgacgattacgaggccaagcagcagttcaagctgatgttcgagaaggcccggctgatcggcaagggcacaacagagcctcatccatttctgtacaaggtgttcgcccgcagcatccccgccaatgccgtcgagttctacgagcgctacctgatcgagcggaagttctacctgaccggcctgtccaacgagatcaagaaaggcaacagagtggatgtgcccttcatccggcgggaccagaacaagtggaaaacacccgccatgaagaccctgggcagaatctacagcgaggatctgcccgtggaactgcccagacagatgttcgacaatgagatcaagtcccacctgaagtccctgccacagatggaaggcatcgacttcaacaatgccaacgtgacctatctgatcgccgagtacatgaagagagtgctggacgacgacttccagaccttctaccagtggaaccgcaactaccggtacatggacatgcttaagggcgagtacgacagaaagggctccctgcagcactgcttcaccagcgtggaagagagagaaggcctctggaaagagcgggcctccagaacagagcggtacagaaagcaggccagcaacaagatccgcagcaaccggcagatgagaaacgccagcagcgaagagatcgagacaatcctggataagcggctgagcaacagccggaacgagtaccagaaaagcgagaaagtgatccggcgctacagagtgcaggatgccctgctgtttctgctggccaaaaagaccctgaccgaactggccgatttcgacggcgagaggttcaaactgaaagaaatcatgcccgacgccgagaagggaatcctgagcgagatcatgcccatgagcttcaccttcgagaaaggcggcaagaagtacaccatcaccagcgagggcatgaagctgaagaactacggcgacttctttgtgctggctagcgacaagaggatcggcaacctgctggaactcgtgggcagcgacatcgtgtccaaagaggatatcatggaagagttcaacaaatacgaccagtgcaggcccgagatcagctccatcgtgttcaacctggaaaagtgggccttcgacacataccccgagctgtctgccagagtggaccgggaagagaaggtggacttcaagagcatcctgaaaatcctgctgaacaacaagaacatcaacaaagagcagagcgacatcctgcggaagatccggaacgccttcgatcacaacaattaccccgacaaaggcgtggtggaaatcaaggccctgcctgagatcgccatgagcatcaagaaggcctttggggagtacgccatcatgaagtagtaatctagaacgcgttaagtcgacaatcaacctctggattacaaaatttgtgaaagattgactggtattcttaactatgttgctccttttacgctatgtggatacgctgctttaatgcctttgtatcatgctattgcttcccgtatggctttcattttctcctccttgtataaatcctggttgctgtctctttatgaggagttgtggcccgttgtcaggcaacgtggcgtggtgtgcactgtgtttgctgacgcaacccccactggttggggcattgccaccacctgtcagctcctttccgggactttcgctttccccctccctattgccacggcggaactcatcgccgcctgccttgcccgctgctggacaggggctcggctgttgggcactgacaattccgtggtgttgtcggggaaatcatcgtcctttccttggctgctcgcctgtgttgccacctggattctgcgcgggacgtccttctgctacgtcccttcggccctcaatccagcggaccttccttcccgcggcctgctgccggctctgcggcctcttccgcgtcttcgccttcgccctcagacgagtcggatctccctttgggccgcctccccgcgtcgactttaagaccaatgacttacaaggcagctgtagatcttagccactttttaaaagaaaaggggggactggaagggctaattcactcccaacgaagacaagatctgctttttgcttgtactgggtctctctggttagaccagatctgagcctgggagctctctggctaactagggaacccactgcttaagcctcaataaagcttgccttgagtgcttcaagtagtgtgtgcccgtctgttgtgtgactctggtaactagagatccctcagacccttttagtcagtgtggaaaatctctagcagggcccgtttaaacccgctgatcagcctcgactgtgccttctagttgccagccatctgttgtttgcccctcccccgtgccttccttgaccctggaaggtgccactcccactgtcctttcctaataaaatgaggaaattgcatcgcatgtctgagtaggtgtcattctattctggggggtggggtggggcaggacagcaagggggaggattgggaagacaatagcaggcatgctggggatgcggtgggctctatggcttctgaggcggaaagaaccagctggggctctagggggtatccccacgcgccctgtagcggcgcattaacgcggcgggtgtggtggttacgcgcagcgtgaccgctacacttgccagcgccctagcgcccgctcctttcgctttcttcccttcctttctcgccacgttcgccggctttccccgtcaagctctaaatcgggggctccctttagggttccgatttagtgctttacggacctcgaccccaaaaaacttgattagggtgatggttcacgtagtgggccatcgccctgatagacggtttttcgccctttgacgttggagtccacgttctttaatagtggactcttgttccaaactggaacaacactcaaccctatctcggtctattcttttgatttataagggattttgcgatttcggcctattggttaaaaaatgagctgatttaacaaaaatttaacgcgaattaattctgtggaatgtgtgtcagttagggtgtggaaagtccccaggctccccagcaggcagaagtatgcaaagcatgcatctcaattagtcagcaaccaggtgtggaaagtccccaggctccccagcagcagaagtatgcaaagcatgcatctcaattagtcagcaaccatagtcccgcccctaactccgcccatcccgcccctaactccgcccagttccgcccattctccgccccatggctgactaattttttttatttatgcagaggccgaggccgcctctgcctctgagctattccgaagtagtgaggaggcttttttggaggcctaggcttttgcaaaaagctcccgggagcttgtatatccattttcggatctgatcagcacgtgttgacaattaatcatcggcatagtatatcggcatagtataatacgacaaggtgaggaactaaaccatggccaagttgaccagtgccgtccggtgctcaccgcgcgcgacgtcgccggagcggtcgagttctggaccgaccggctcgggttctcccgggacttcgtggaggacgacttcgccggtgtggtccgggacgacgtgaccctgttcatcagcgcggtccaggaccaggtggtgccggacaacaccctggcctggggtgggtgcgcggcctggacgagctgtacgccgagtggtcggaggtcgtgtccacgaacttccgggacgcctccgggccggccatgaccgagatcggcgagcagccgtgggggcgggagttcgccctgcgcgacccggccggcaactgcgtgcacttcgtggccgaggacaggactgacacgtgctacgagatttcgattccaccgccgccttctatgaaaggttgggcttcggaatcgttttccgggacgccggctggatgatcctccagcgcggggatctcatgctggagttcttcgcccaccccaacttgtttattgcagcttataatggttcaaataaagcaatagcatcacaaatttcacaaataaagcatttttttcactgcattctagttgtggtttgtccaaactcatcaatgtatcttatcatgtctgtataccgtcgacctctagctagagcttggcgtaatcatggtcatagctgtttcctgtgtgaaattgttatccgctcaaattccacacaacatacgagccggaagcataaagtgtaaagcctggggtgcctaatgagtgagctaactcacattaattgcgttgcgctcactgcccgctttccagtcgggaaacctgtcgtgccagctgcattaatgaatcggccaacgcgcggggagaggcggtttgcgtattgggcgtcttccgcttcctcgctcactgactcgctgcgctcggtcgttcggctgcggcgagcggtatcagctcactcaaaggcggtaatacggttatccacagaatcaggggataacgcaggaaagaacatgtgagcaaaaggccagcaaaaggccaggaaccgtaaaaaggccgcgttgctgcgtttttccataggctccgcccccctgacgagcatcacaaaaatcgacgctcaagtcagaggtggcgaaacccgacaggactataaagataccaggcgtttccccctggaagctccctcgtgcgctctcctgttccgaccctgccgcttaccggatacctgtcccctttctcccttcgggaagcgtggcgctttctcatagctcacgctgtaggtatctcagttcggtgtaggtcgttcgctccaagctgggctgtgtgcacgaaccccccgttcagcccgaccgctgcgccttatccggtaactatcgtcttgagtccaacccggtaagacacgactatcgccactggcagcagccactggtaacaggattagcagagcgaggtatgtaggcggtgctacagagttcttgaagtggtggcctaactacggctacactagaagaacagtatttggtatctgcgctctgctgaagccagttaccttcggaaaaagagttggtagctcttgaccggcaaacaaaccaccgctggtagcggtggtttttttgtttgcaagcagcagattacgcgcagaaaaaaaggatctcaagaagatcctttgatcttttctacggggtctgacgctcagtggaacgaaaactcacgttaagggattttggtcatgagattatcaaaaaggatcttccctagatccttttaaattaaaaatgaagttttaaatcaatctaaagtatatatgagtaaacttggtctgacagttaccaatgcttaatcagtgaggcacctatctcagcgatctgtctatttcgttcatccatagttgcctgactccccgtcgtgtagataactacgatacgggaggcttaccatctggccccagtgctgcaatgataccgcgagacccacgctcaccggctccagatttatcagcaataaaccagccagccggaagggccgagcgcagaagtggtcctgcaactttatccgcctccatccagtctattaattgttgccgggaagctagagtaagtagttcgcagttaatagtttgcgcaacgttgttgccattgctacaggcatcgtggtgtcacgctcgtcgtttggtatggcttcattcagctccggttcccaacgatcaaggcgagttacatgatcccccatgttgtgcaaaaaagcggttagctccttcggtcctccgatcgttgtcagaataagttggccgcagtgttatcactcatggttatggcagcactgcataattctcttactgtcatgccatccgtaagatgcttttctgtgactggtgagtactcaaccaagtcattctgagaatagtgtatgcggcgaccgagttgctcttgcccggcgtcaatacgggataataccgcgcacatagcagaactttaaaagtgctcatcattggaaaacgttcttcggggcgaaaactctcaaggatcttaccgctgttgagatccagttcgatgtaacccactcgtgcacccaactgatcttcagcatcttttactttcaccagcgtttctgggtgagcaaaaacaggaaggcaaatgccgcaaaaaagggaataagggcgacacggaaatgttgaatactcatactcttcctttttcaatattattgaagcatttatcagggttattgtctcatgagcggatacatatttgaatgtatttagaaaaataaacaaataggggttccgcgcacatttccccgaaaagtgcacctgac

SEQ ID NO: 282 - DNA, 12081 bp, Artificial Sequence
  Chemically Synthesized
gtcgacggatcgggagatctcccgatcccctatggtgcactctcagtacaatctgctctgatgccgcatagttaagccagtatctgctccctgcttgtgtgttggaggtcgctgagtagtgcgcgagcaaaatttaagctacaacaaggcaaggcttgaccgacaattgcatgaagaatctgcttagggttaggcgttttgcgctgcttcgcgatgtacgggccagatatacgcgttgacattgattattgactagttattaatagtaatcaattacggggtcattagttcatagcccatatatggagttccgcgttacataacttacggtaaatggcccgcctggctgaccgcccaacgacccccgcccattgacgtcaataatgacgtatgttcccatagtaacgccaatagggactttccattgacgtcaatgggtggagtatttacggtaaactgcccacttggcagtacatcaagtgtatcatatgccaagtacgccccctattgacgtcaatgacggtaaatggcccgcctggcattatgcccagtacatgaccttatgggactttcctacttggcagtacatctacgtattagtcatcgctattaccatggtgatgcggttttggcagtacatcaatgggcgtggatagcggtttgactcacggggatttccaagtctccaccccattgacgtcaatgggagtttgttttggcaccaaaatcaacgggactttccaaaatgtcgtaacaactccgccccattgacgcaaatgggcggtaggcgtgtacggtgggaggtctatataagcagcgcgttttgcctgtactgggtctctctggttagaccagatctgagcctgggagctctctggctaactagggaacccactgcttaagcctcaataaagcttgccttgagtgcttcaagtagtgtgtgcccgtctgttgtgtgactctggtaactagagatccctcagacccttttagtcagtgtggaaaatctctagcagtggcgcccgaacagggacttgaaagcgaaagggaaaccagaggagctctctcgacgcaggactcggcttgctgaagcgcgcacggcaagaggcgaggggcggcgactggtgagtacgccaaaaattttgactagcggaggctagaaggagagagatgggtgcgagagcgtcagtattaagcgggggagaattagatcgcgatgggaaaaaattcggttaaggccagggggaaagaaaaaatataaattaaaacatatagtatgggcaagcagggagctagaacgattcgcagttaatcctggcctgttagaaacatcagaaggctgtagacaaatactgggacagctacaaccatcccttcagacaggatcagaagaacttagatcattatataatacagtagcaaccctctattgtgtgcatcaaaggatagagataaaagacaccaaggaagctttagacaagatagaggaagagcaaaacaaaagtaagaccaccgcacagcaagcggccgctgatcttcagacctggaggaggagatatgagggacaattggagaagtgaattatataaatataaagtagtaaaaattgaaccattaggagtagcacccaccaaggcaaagagaagagtggtgcagagagaaaaaagagcagtgggaataggagctttgttccttgggttcttgggagcagcaggaagcactatgggcgcagcgtcaatgacgctgacggtacaggccagacaattattgtctggtatagtgcagcagcagaacaatttgctgagggctattgaggcgcaacagcatctgttgcaactcacagtctggggcatcaagcagctccaggcaagaatcctggctgtggaaagatacctaaaggatcaacagctcctggggatttggggttgctctggaaaactcatttgcaccactgctgtgccttggaatgctagttggagtaataaatctctggaacagatttggaatcacacgacctggatggagtgggacagagaaattaacaattacacaagcttaatacactccttaattgaagaatcgcaaaaccagcaagaaaagaatgaacaagaattattggaattagataaatgggcaagtttgtggaattggtttaacataacaaattggctgtggtatataaaattattcataatgatagtaggaggcttggtaggtttaagaatagtttttgctgtactttctatagtgaatagagttaggcagggatattcaccattatcgtttcagacccacctcccaaccccgaggggacccgacaggcccgaaggaatagaagaagaaggtggagagagagacagagacagatccattcgattagtgaacggatcggcactgcgtgcgccaattctgcagacaaatggcagtattcatccacaattttaaaagaaaaggggggattggggggtacagtgcaggggaaagaatagtagacataatagcaacagacatacaaactaaagaattacaaaaacaaattacaaaaattcaaaattttcgggtttattacagggacagcagagatccagtttggttaattaaggtaccgagggcctatttcccatgattccttcatatttgcatatacgatacaaggctgttagagagataattagaattaatttgactgtaaacacaaagatattagtacaaaatacgtgacgtagaaagtaataatttcttgggtagtttgcagttttaaaattatgttttaaaatggactatcatatgcttaccgtaacttgaaagtatttcgatttcttggctttatatatcttgtggaaaggacgaaacaccgagatcgaaagttggttggtttgttacctggttgtggaaggtccagttttgaggggctattacaactttttttgaattcacatcgatatctagaggtacccgttacataacttacggtaaatggcccgcctggctgaccgcccaacgacccccgcccattgacgtcaatagtaacgccaatagggactttccattgacgtcaatgggtggagtatttacggtaaactgcccacttggcagtacatcaagtgtatcatatgccaagtacgccccctattgacgtcaatgacggtaaatggcccgcctggcattgtgcccagtacatgaccttatgggactttcctacttggcagtacatctacgtattagtcatcgctattaccatggtcgaggtgagccccacgttctgcttcactctccccatctcccccccctccccacccccaattttgtatttatttattttttaattattttgtgcagcgatgggggcggggggggggggggggcggggcgaggggcggggcggggcgaggcggagaggtgcggcggcagccaatcagagcggcgcgctccgaaagtttccttttatggcgaggcggcggcggcggcggccctataaaaagcgaagcgcgcggcgggcgggagtcgctgcgcgctgccttcgccccgtgccccgctccgccgccgcctcgcgccgcccgccccggctctgactgaccgcgttactcccacaggtgagcgggcgggacggcccttctcctccgggctgtaattagctgagcaagaggtaagggtttaagggatggttggttggtggggtattaatgtttaattacctggagcacctgcctgaaatcactttttttcaggttggaccggtacatcgatactcgagcgccaccatggactacaaagaccatgacggtgattataaagatcatgacatcgattacaaggatgacgatgacaagggatcccttcaactgcctccacttgaaagactgacactgggtagttccaacatccccgctctggtggaaaaccagaagaagtactttggcacctacagcgtgatggccatgctgaacgctcagaccgtgctggaccacatccagaaggtggccgatattgagggcgagcagaacgagaacaacgagaatctgtggtttcaccccgtgatgagccacctgtacaacgccaagaacggctacgacaagcagcccgagaaaaccatgttcatcatcgagcggctgcagagctacttcccattcctgaagatcatggccgagaaccagagagagtacagcaacggcaagtacaagcagaaccgcgtggaagtgaacagcaacgacatcttcgaggtgctgaagcgcgccttcggcgtgctgaagatgtacagggacctgaccaaccactacaagacctacgaggaaaagctgaacgacggctgcgagttcctgaccagcacagagcaacctctgagcggcatgatcaacaactactacacagtggccctgcggaacatgaacgagagatacggctacaagacagaggacctggccttcatccaggacaagcggttcaagttcgtgaaggacgcctacggcaagaaaaagtcccaagtgaataccggattcttcctgagcctgcaggactacaacggcgacacacagaagaagctgcacctgagcggagtgggaatcgccctgctgatctgcctgttcctggacaagcagtacatcaacatctttctgagcaggctgcccatcttctccagctacaatgcccagagcgaggaacggcggatcatcatcagatccttcggcatcaacagcatcaagctgcccaaggaccggatccacagcgagaagtccaacaagagcgtggccatggatatgctcaacgaagtgaagcggtgccccgacgagctgttcacaacactgtctgccgagaagcagtcccggttcagaatcatcagcgacgaccacaatgaagtgctgatgaagcggagcagcgacagattcgtgcctctgctgctgcagtatatcgattacggcaagctgttcgaccacatcaggttccacgtgaacatgggcaagctgagatacctgctgaaggccgacaagacctgcatcgacggccagaccagagtcagagtgatcgagcagcccctgaacggcttcggcagactggaagaggccgagacaatgcggaagcaagagaacggcaccttcggcaacagcggcatccggatcagagacttcgagaacatgaagcgggacgacgccaatcctgccaactatccctacatcgtggacacctacacacactacatcctggaaaacaacaaggtcgagatgtttatcaacgacaaagaggacagcgccccactgctgcccgtgatcgaggatgatagatacgtggtcaagacaatccccagctgccggatgagcaccctggaaattccagccatggccttccacatgtttctgttcggcagcaagaaaaccgagaagctgatcgtggacgtgcacaaccggtacaagagactgttccaggccatgcagaaagaagaagtgaccgccgagaatatcgccagcttcggaatcgccgagagcgacctgcctcagaagatcctggatctgatcagcggcaatgcccacggcaaggatgtggacgccttcatcagactgaccgtggacgacatgctgaccgacaccgagcggagaatcaagagattcaaggacgaccggaagtccattcggagcgccgacaacaagatgggaaagagaggcttcaagcagatctccacaggcaagctggccgacttcctggccaaggacatcgtgctgtttcagcccagcgtgaacgatggcgagaacaagatcaccggcctgaactaccggatcatgcagagcgccattgccgtgtacgatagcggcgacgattacgaggccaagcagcagttcaagctgatgttcgagaaggcccggctgatcggcaagggcacaacagagcctcatccatttctgtacaaggtgttcgcccgcagcatccccgccaatgccgtcgagttctacgagcgctacctgatcgagcggaagttctacctgaccggcctgtccaacgagatcaagaaaggcaacagagtggatgtgcccttcatccggcgggaccagaacaagtggaaaacacccgccatgaagaccctgggcagaatctacagcgaggatctgcccgtggaactgcccagacagatgttcgacaatgagatcaagtcccacctgaagtccctgccacagatggaaggcatcgacttcaacaatgccaacgtgacctatctgatcgccgagtacatgaagagagtgctggacgacgacttccagaccttctaccagtggaaccgcaactaccggtacatggacatgcttaagggcgagtacgacagaaagggctccctgcagcactgcttcaccagcgtggaagagagagaaggcctctggaaagagcgggcctccagaacagagcggtacagaaagcaggccagcaacaagatccgcagcaaccggcagatgagaaacgccagcagcgaagagatcgagacaatcctggataagcggctgagcaacagccggaacgagtaccagaaaagcgagaaagtgatccggcgctacagagtgcaggatgccctgctgtttctgctggccaaaaagaccctgaccgaactggccgatttcgacggcgagaggttcaaactgaaagaaatcatgcccgacgccgagaagggaatcctgagcgagatcatgcccatgagcttcaccttcgagaaaggcggcaagaagtacaccatcaccagcgagggcatgaagctgaagaactacggcgacttctttgtgctggctagcgacaagaggatcggcaacctgctggaactcgtgggcagcgacatcgtgtccaaagaggatatcatggaagagttcaacaaatacgaccagtgcaggcccgagatcagctccatcgtgttcaacctggaaaagtgggccttcgacacataccccgagctgtctgccagagtggaccgggaagagaaggtggacttcaagagcatcctgaaaatcctgctgaacaacaagaacatcaacaaagagcagagcgacatcctgcggaagatccggaacgccttcgatcacaacaattaccccgacaaaggcgtggtggaaatcaaggccctgcctgagatcgccatgagcatcaagaaggcctttggggagtacgccatcatgaagtagtaatctagaacgcgttaagtcgacaatcaacctctggattacaaaatttgtgaaagattgactggtattcttaactatgttgctccttttacgctatgtggatacgctgctttaatgcctttgtatcatgctattgcttcccgtatggctttcattttctcctccttgtataaatcctggttgctgtctctttatgaggagttgtggcccgttgtcaggcaacgtggcgtggtgtgcactgtgtttgctgacgcaacccccactggttggggcattgccaccacctgtcagctcctttccgggactttcgctttccccctccctattgccacggcggaactcatcgccgcctgccttgcccgctgctggacaggggctcggctgttgggcactgacaattccgtggtgttgtcggggaaatcatcgtcctttccttggctgctcgcctgtgttgccacctggattctgcgcgggacgtccttctgctacgtcccttcggccctcaatccagcggaccttccttcccgcggcctgctgccggctctgcggcctcttccgcgtcttcgccttcgccctcagacgagtcggatctccctttgggccgcctccccgcgtcgactttaagaccaatgacttacaaggcagctgtagatcttagccactttttaaaagaaaaggggggactggaagggctaattcactcccaacgaagacaagatctgctttttgcttgtactgggtctctctggttagaccagatctgagcctgggagctctctggctaactagggaacccactgcttaagcctcaataaagcttgccttgagtgcttcaagtagtgtgtgcccgtctgttgtgtgactctggtaactagagatccctcagacccttttagtcagtgtggaaaatctctagcagggcccgtttaaacccgctgatcagcctcgactgtgccttctagttgccagccatctgttgtttgcccctcccccgtgccttccttgaccctggaaggtgccactcccactgtcctttcctaataaaatgaggaaattgcatcgcattgtctgagtaggtgtcattctattctggggggtggggtggggcaggacagcaagggggaggattgggaagacaatagcaggcatgctggggatgcggtgggctctatggcttctgaggcggaaagaaccagctggggctctagggggtatccccacgcgccctgtagcggcgcattaagcgcggcgggtgtggtggttacgcgcagcgtgaccgctacacttgccagcgccctagcgcccgctcctttcgctttcttcccttcctttctcgccacgttcgccggctttccccgtcaagctctaaatcgggggctccctttagggttccgatttagtgctttacggcacctcgaccccaaaaaacttgattagggtgatggttcacgtagtgggccatcgccctgatagacggtttttcgccctttgacgttggagtccacgttctttaatagtggactcttgttccaaactggaacaacactcaaccctatctcggtctattcttttgatttataagggattttgccgatttcggcctattggttaaaaaatgagctgatttaacaaaaatttaacgcgaattaattctgtggaatgtgtgtcagttagggtgtggaaagtccccaggctccccagcaggcagaagtatgcaaagcatgcatctcaattagtcagcaaccaggtgtggaaagtccccaggctccccagcaggcagaagtatgcaaagcatgcatctcaattagtcagcaaccatagtcccgcccctaactccgcccatcccgcccctaactccgcccagttccgcccattctccgccccatggctgactaattttttttatttatgcagaggccgaggccgcctctgcctctgagctattccagaagtagtgaggaggcttttttggaggcctaggcttttgcaaaaagctcccgggagcttgtatatccattttcggatctgatcagcacgtgttgacaattaatcatcggcatagtatatcggcatagtataatacgacaaggtgaggaactaaaccatggccaagttgaccagtgccgttccggtgctcaccgcgcgcgacgtcgccggagcggtcgagttctggaccgaccggctcgggttctcccgggacttcgtggaggacgacttcgccggtgtggtccgggacgacgtgaccctgttcatcagcgcggtccaggaccaggtggtgccggacaacaccctggcctgggtgtgggtgcgcggcctggacgagctgtacgccgagtggtcggaggtcgtgtccacgaacttccgggacgcctccgggccggccatgaccgagatcggcgagcagccgtgggggcgggagttcgccctgcgcgacccggccggcaactgcgtgcacttcgtggccgaggagcaggactgacacgtgctacgagatttcgattccaccgccgccttctatgaaaggttgggcttcggaatcgttttccgggacgccggctggatgatcctccagcgcggggatctcatgctggagttcttcgcccaccccaacttgtttattgcagcttataatggttacaaataaagcaatagcatcacaaatttcacaaataaagcatttttttcactgcattctagttgtggtttgtccaaactcatcaatgtatcttatcatgtctgtataccgtcgacctctagctagagcttggcgtaatcatggtcatagctgtttcctgtgtgaaattgttatccgctcacaattccacacaacatacgagccggaagcataaagtgtaaagcctggggtgcctaatgagtgagctaactcacattaattgcgttgcgctcactgcccgctttccagtcgggaaacctgtcgtgccagctgcattaatgaatcggccaacgcgcggggagaggcggtttgcgtattgggcgctcttccgcttcctcgctcactgactcgctgcgctcggtcgttcggctgcggcgagcggtatcagctcactcaaaggcggtaatacggttatccacagaatcaggggataacgcaggaaagaacatgtgagcaaaaggccagcaaaaggccaggaaccgtaaaaaggccgcgttgctggcgtttttccataggctccgcccccctgacgagcatcacaaaaatcgacgctcaagtcagaggtggcgaaacccgacaggactataaagataccaggcgtttccccctggaagctccctcgtgcgctctcctgttccgaccctgccgcttaccggatacctgtccgcctttctcccttcgggaagcgtggcgctttctcatagctcacgctgtaggtatctcagttcggtgtaggtcgttcgctccaagctgggctgtgtgcacgaaccccccgttcagcccgaccgctgcgccttatccggtaactatcgtcttgagtccaacccggtaagacacgacttatcgccactggcagcagccactggtaacaggattagcagagcgaggtatgtaggcggtgctacagagttcttgaagtggtggcctaactacggctacactagaagaacagtatttggtatctgcgctctgctgaagccagttaccttcggaaaaagagttggtagctcttgatccggcaaacaaaccaccgctggtagcggtggtttttttgtttgcaagcagcagattacgcgcagaaaaaaaggatctcaagaagatcctttgatcttttctacggggtctgacgctcagtggaacgaaaactcacgttaagggattttggtcatgagattatcaaaaaggatcttcacctagatccttttaaattaaaaatgaagttttaaatcaatctaaagtatatatgagtaaacttggtctgacagttaccaatgcttaatcagtgaggcacctatctcagcgatctgtctatttcgttcatccatagttgcctgactccccgtcgtgtagataactacgatacgggagggcttaccatctggccccagtgctgcaatgataccgcgagacccacgctcaccggctccagatttatcagcaataaaccagccagccggaagggccgagcgcagaagtggtcctgcaactttatccgcctccatccagtctattaattgttgccgggaagctagagtaagtagttcgccagttaatagtttgcgcaacgttgttgccattgctacaggcatcgtggtgtcacgctcgtcgtttggtatggcttcattcagctccggttcccaacgatcaaggcgagttacatgatcccccatgttgtgcaaaaaagcggttagctccttcggtcctccgatcgttgtcagaagtaagttggccgcagtgttatcactcatggttatggcagcactgcataattctcttactgtcatgccatccgtaagatgcttttctgtgactggtgagtactcaaccaagtcattctgagaatagtgtatgcggcgaccgagttgctcttgcccggcgtcaatacgggataataccgcgccacatagcagaactttaaaagtgctcatcattggaaaacgttcttcggggcgaaaactctcaaggatcttaccgctgttgagatccagttcgatgtaacccactcgtgcacccaactgatcttcagcatcttttactttcaccagcgtttctgggtgagcaaaaacaggaaggcaaaatgccgcaaaaaagggaataagggcgacacggaaatgttgaatactcatactcttcctttttcaatattattgaagcatttatcagggttattgtctcatgagcggatacatatttgaatgtatttagaaaaataaacaaataggggttccgcgcacatttccccgaaaagtgccacctgac

SEQ ID NO: 283 - DNA, 12213 bp, Artificial Sequence
  Chemically Synthesized
gtcgacggatcgggagatctcccgatcccctatggtgcactctcagtacaatctgctctgatgccgcatagttaagccagtatctgctccctgcttgtgtgttggaggtcgctgagtagtgcgcgagcaaaatttaagctacaacaaggcaaggcttgaccgacaattgcatgaagaatctgcttagggttaggcgttttgcgctgcttcgcgatgtacgggccagatatacgcgttgacattgattattgactagttattaatagtaatcaattacggggtcattagttcatagcccatatatggagttccgcgttacataacttacggtaaatggcccgcctggctgaccgcccaacgacccccgcccattgacgtcaataatgacgtatgttcccatagtaacgccaatagggactttccattgacgtcaatgggtggagtatttacggtaaactgcccacttggcagtacatcaagtgtatcatatgccaagtacgccccctattgacgtcaatgacggtaaatggcccgcctggcattatgcccagtacatgaccttatgggactttcctacttggcagtacatctacgtattagtcatcgctattaccatggtgatgcggttttggcagtacatcaatgggcgtggatagcggtttgactcacggggatttccaagtctccaccccattgacgtcaatgggagtttgttttggcaccaaaatcaacgggactttccaaaatgtcgtaacaactccgccccattgacgcaaatgggcggtaggcgtgtacggtgggaggtctatataagcagcgcgttttgcctgtactgggtctctctggttagaccagatctgagcctgggagctctctggctaactagggaacccactgcttaagcctcaataaagcttgccttgagtgcttcaagtagtgtgtgcccgtctgttgtgtgactctggtaactagagatccctcagacccttttagtcagtgtggaaaatctctagcagtggcgcccgaacagggacttgaaagcgaaagggaaaccagaggagctctctcgacgcaggactcggcttgctgaagcgcgcacggcaagaggcgaggggcggcgactggtgagtacgccaaaaattttgactagcggaggctagaaggagagagatgggtgcgagagcgtcagtattaagcgggggagaattagatcgcgatgggaaaaaattcggttaaggccagggggaaagaaaaaatataaattaaaacatatagtatgggcaagcagggagctagaacgattcgcagttaatcctggcctgttagaaacatcagaaggctgtagacaaatactgggacagctacaaccatcccttcagacaggatcagaagaacttagatcattatataatacagtagcaaccctctattgtgtgcatcaaaggatagagataaaagacaccaaggaagctttagacaagatagaggaagagcaaaacaaaagtaagaccaccgcacagcaagcggccgctgatcttcagacctggaggaggagatatgagggacaattggagaagtgaattatataaatataaagtagtaaaaattgaaccattaggagtagcacccaccaaggcaaagagaagagtggtgcagagagaaaaaagagcagtgggaataggagctttgttccttgggttcttgggagcagcaggaagcactatgggcgcagcgtcaatgacgctgacggtacaggccagacaattattgtctggtatagtgcagcagcagaacaatttgctgagggctattgaggcgcaacagcatctgttgcaactcacagtctggggcatcaagcagctccaggcaagaatcctggctgtggaaagatacctaaaggatcaacagctcctggggatttggggttgctctggaaaactcatttgcaccactgctgtgccttggaatgctagttggagtaataaatctctggaacagatttggaatcacacgacctggatggagtgggacagagaaattaacaattacacaagcttaatacactccttaattgaagaatcgcaaaaccagcaagaaaagaatgaacaagaattattggaattagataaatgggcaagtttgtggaattggtttaacataacaaattggctgtggtatataaaattattcataatgatagtaggaggcttggtaggtttaagaatagtttttgctgtactttctatagtgaatagagttaggcagggatattcaccattatcgtttcagacccacctcccaaccccgaggggacccgacaggcccgaaggaatagaagaagaaggtggagagagagacagagacagatccattcgattagtgaacggatcggcactgcgtgcgccaattctgcagacaaatggcagtattcatccacaattttaaaagaaaaggggggattggggggtacagtgcaggggaaagaatagtagacataatagcaacagacatacaaactaaagaattacaaaaacaaattacaaaaattcaaaattttcgggtttattacagggacagcagagatccagtttggttaattaaggtaccgagggcctatttcccatgattccttcatatttgcatatacgatacaaggctgttagagagataattagaattaatttgactgtaaacacaaagatattagtacaaaatacgtgacgtagaaagtaataatttcttgggtagtttgcagttttaaaattatgttttaaaatggactatcatatgcttaccgtaacttgaaagtatttcgatttcttggctttatatatcttgtggaaaggacgaaacaccgagatcgaaagttggttggtttgttacctggttgtggaaggtccagtcttgaggggctattacaacgttcccgaaggtgtgacttccatgccaatggttgtggaaggtccagctttgaggggctattacaacgcgtggcctcggtgaaaatgtggtggctctgttgtggaaggtccagttttgaggggctattacaactttttttgaattcacatcgatatctagaggtacccgttacataacttacggtaaatggcccgcctggctgaccgcccaacgacccccgcccattgacgtcaatagtaacgccaatagggactttccattgacgtcaatgggtggagtatttacggtaaactgcccacttggcagtacatcaagtgtatcatatgccaagtacgccccctattgacgtcaatgacggtaaatggcccgcctggcattgtgcccagtacatgaccttatgggactttcctacttggcagtacatctacgtattagtcatcgctattaccatggtcgaggtgagccccacgttctgcttcactctccccatctcccccccctccccacccccaattttgtatttatttattttttaattattttgtgcagcgatgggggcggggggggggggggggcggggcgaggggcggggcggggcgaggcggagaggtgcggcggcagccaatcagagcggcgcgctccgaaagtttccttttatggcgaggcggcggcggcggcggccctataaaaagcgaagcgcgcggcgggcgggagtcgctgcgcgctgccttcgccccgtgccccgctccgccgccgcctcgcgccgcccgccccggctctgactgaccgcgttactcccacaggtgagcgggcgggacggcccttctcctccgggctgtaattagctgagcaagaggtaagggtttaagggatggttggttggtggggtattaatgtttaattacctggagcacctgcctgaaatcactttttttcaggttggaccggtacatcgatactcgagcgccaccatggactacaaagaccatgacggtgattataaagatcatgacatcgattacaaggatgacgatgacaagggatcccttcaactgcctccacttgaaagactgacactgggtagttccaacatccccgctctggtggaaaaccagaagaagtactttggcacctacagcgtgatggccatgctgaacgctcagaccgtgctggaccacatccagaaggtggccgatattgagggcgagcagaacgagaacaacgagaatctgtggtttcaccccgtgatgagccacctgtacaacgccaagaacggctacgacaagcagcccgagaaaaccatgttcatcatcgagcggctgcagagctacttcccattcctgaagatcatggccgagaaccagagagagtacagcaacggcaagtacaagcagaaccgcgtggaagtgaacagcaacgacatcttcgaggtgctgaagcgcgccttcggcgtgctgaagatgtacagggacctgaccaaccactacaagacctacgaggaaaagctgaacgacggctgcgagttcctgaccagcacagagcaacctctgagcggcatgatcaacaactactacacagtggccctgcggaacatgaacgagagatacggctacaagacagaggacctggccttcatccaggacaagcggttcaagttcgtgaaggacgcctacggcaagaaaaagtcccaagtgaataccggattcttcctgagcctgcaggactacaacggcgacacacagaagaagctgcacctgagcggagtgggaatcgccctgctgatctgcctgttcctggacaagcagtacatcaacatctttctgagcaggctgcccatcttctccagctacaatgcccagagcgaggaacggcggatcatcatcagatccttcggcatcaacagcatcaagctgcccaaggaccggatccacagcgagaagtccaacaagagcgtggccatggatatgctcaacgaagtgaagcggtgccccgacgagctgttcacaacactgtctgccgagaagcagtcccggttcagaatcatcagcgacgaccacaatgaagtgctgatgaagcggagcagcgacagattcgtgcctctgctgctgcagtatatcgattacggcaagctgttcgaccacatcaggttccacgtgaacatgggcaagctgagatacctgctgaaggccgacaagacctgcatcgacggccagaccagagtcagagtgatcgagcagcccctgaacggcttcggcagactggaagaggccgagacaatgcggaagcaagagaacggcaccttcggcaacagcggcatccggatcagagacttcgagaacatgaagcgggacgacgccaatcctgccaactatccctacatcgtggacacctacacacactacatcctggaaaacaacaaggtcgagatgtttatcaacgacaaagaggacagcgccccactgctgcccgtgatcgaggatgatagatacgtggtcaagacaatccccagctgccggatgagcaccctggaaattccagccatggccttccacatgtttctgttcggcagcaagaaaaccgagaagctgatcgtggacgtgcacaaccggtacaagagactgttccaggccatgcagaaagaagaagtgaccgccgagaatatcgccagcttcggaatcgccgagagcgacctgcctcagaagatcctggatctgatcagcggcaatgcccacggcaaggatgtggacgccttcatcagactgaccgtggacgacatgctgaccgacaccgagcggagaatcaagagattcaaggacgaccggaagtccattcggagcgccgacaacaagatgggaaagagaggcttcaagcagatctccacaggcaagctggccgacttcctggccaaggacatcgtgctgtttcagcccagcgtgaacgatggcgagaacaagatcaccggcctgaactaccggatcatgcagagcgccattgccgtgtacgatagcggcgacgattacgaggccaagcagcagttcaagctgatgttcgagaaggcccggctgatcggcaagggcacaacagagcctcatccatttctgtacaaggtgttcgcccgcagcatccccgccaatgccgtcgagttctacgagcgctacctgatcgagcggaagttctacctgaccggcctgtccaacgagatcaagaaaggcaacagagtggatgtgcccttcatccggcgggaccagaacaagtggaaaacacccgccatgaagaccctgggcagaatctacagcgaggatctgcccgtggaactgcccagacagatgttcgacaatgagatcaagtcccacctgaagtccctgccacagatggaaggcatcgacttcaacaatgccaacgtgacctatctgatcgccgagtacatgaagagagtgctggacgacgacttccagaccttctaccagtggaaccgcaactaccggtacatggacatgcttaagggcgagtacgacagaaagggctccctgcagcactgcttcaccagcgtggaagagagagaaggcctctggaaagagcgggcctccagaacagagcggtacagaaagcaggccagcaacaagatccgcagcaaccggcagatgagaaacgccagcagcgaagagatcgagacaatcctggataagcggctgagcaacagccggaacgagtaccagaaaagcgagaaagtgatccggcgctacagagtgcaggatgccctgctgtttctgctggccaaaaagaccctgaccgaactggccgatttcgacggcgagaggttcaaactgaaagaaatcatgcccgacgccgagaagggaatcctgagcgagatcatgcccatgagcttcaccttcgagaaaggcggcaagaagtacaccatcaccagcgagggcatgaagctgaagaactacggcgacttctttgtgctggctagcgacaagaggatcggcaacctgctggaactcgtgggcagcgacatcgtgtccaaagaggatatcatggaagagttcaacaaatacgaccagtgcaggcccgagatcagctccatcgtgttcaacctggaaaagtgggccttcgacacataccccgagctgtctgccagagtggaccgggaagagaaggtggacttcaagagcatcctgaaaatcctgctgaacaacaagaacatcaacaaagagcagagcgacatcctgcggaagatccggaacgccttcgatcacaacaattaccccgacaaaggcgtggtggaaatcaaggccctgcctgagatcgccatgagcatcaagaaggcctttggggagtacgccatcatgaagtagtaatctagaacgcgttaagtcgacaatcaacctctggattacaaaatttgtgaaagattgactggtattcttaactatgttgctccttttacgctatgtggatacgctgctttaatgcctttgtatcatgctattgcttcccgtatggctttcattttctcctccttgtataaatcctggttgctgtctctttatgaggagttgtggcccgttgtcaggcaacgtggcgtggtgtgcactgtgtttgctgacgcaacccccactggttggggcattgccaccacctgtcagctcctttccgggactttcgctttccccctccctattgccacggcggaactcatcgccgcctgccttgcccgctgctggacaggggctcggctgttgggcactgacaattccgtggtgttgtcggggaaatcatcgtcctttccttggctgctcgcctgtgttgccacctggattctgcgcgggacgtccttctgctacgtcccttcggccctcaatccagcggaccttccttcccgcggcctgctgccggctctgcggcctcttccgcgtcttcgccttcgccctcagacgagtcggatctccctttgggccgcctccccgcgtcgactttaagaccaatgacttacaaggcagctgtagatcttagccactttttaaaagaaaaggggggactggaagggctaattcactcccaacgaagacaagatctgctttttgcttgtactgggtctctctggttagaccagatctgagcctgggagctctctggctaactagggaacccactgcttaagcctcaataaagcttgccttgagtgcttcaagtagtgtgtgcccgtctgttgtgtgactctggtaactagagatccctcagacccttttagtcagtgtggaaaatctctagcagggcccgtttaaacccgctgatcagcctcgactgtgccttctagttgccagccatctgttgtttgcccctcccccgtgccttccttgaccctggaaggtgccactcccactgtcctttcctaataaaatgaggaaattgcatcgcattgtctgagtaggtgtcattctattctggggggtggggtggggcaggacagcaagggggaggattgggaagacaatagcaggcatgctggggatgcggtgggctctatggcttctgaggcggaaagaaccagctggggctctagggggtatccccacgcgccctgtagcggcgcattaagcgcggcgggtgtggtggttacgcgcagcgtgaccgctacacttgccagcgccctagcgcccgctcctttcgctttcttcccttcctttctcgccacgttcgccggctttccccgtcaagctctaaatcgggggctccctttagggttccgatttagtgctttacggcacctcgaccccaaaaaacttgattagggtgatggttcacgtagtgggccatcgccctgatagacggtttttcgccctttgacgttggagtccacgttctttaatagtggactcttgttccaaactggaacaacactcaaccctatctcggtctattcttttgatttataagggattttgccgatttcggcctattggttaaaaaatgagctgatttaacaaaaatttaacgcgaattaattctgtggaatgtgtgtcagttagggtgtggaaagtccccaggctccccagcaggcagaagtatgcaaagcatgcatctcaattagtcagcaaccaggtgtggaaagtccccaggctccccagcaggcagaagtatgcaaagcatgcatctcaattagtcagcaaccatagtcccgcccctaactccgcccatcccgcccctaactccgcccagttccgcccattctccgccccatggctgactaattttttttatttatgcagaggccgaggccgcctctgcctctgagctattccagaagtagtgaggaggcttttttggaggcctaggcttttgcaaaaagctcccgggagcttgtatatccattttcggatctgatcagcacgtgttgacaattaatcatcggcatagtatatcggcatagtataatacgacaaggtgaggaactaaaccatggccaagttgaccagtgccgttccggtgctcaccgcgcgcgacgtcgccggagcggtcgagttctggaccgaccggctcgggttctcccgggacttcgtggaggacgacttcgccggtgtggtccgggacgacgtgaccctgttcatcagcgcggtccaggaccaggtggtgccggacaacaccctggcctgggtgtgggtgcgcggcctggacgagctgtacgccgagtggtcggaggtcgtgtccacgaacttccgggacgcctccgggccggccatgaccgagatcggcgagcagccgtgggggcgggagttcgccctgcgcgacccggccggcaactgcgtgcacttcgtggccgaggagcaggactgacacgtgctacgagatttcgattccaccgccgccttctatgaaaggttgggcttcggaatcgttttccgggacgccggctggatgatcctccagcgcggggatctcatgctggagttcttcgcccaccccaacttgtttattgcagcttataatggttacaaataaagcaatagcatcacaaatttcacaaataaagcatttttttcactgcattctagttgtggtttgtccaaactcatcaatgtatcttatcatgtctgtataccgtcgacctctagctagagcttggcgtaatcatggtcatagctgtttcctgtgtgaaattgttatccgctcacaattccacacaacatacgagccggaagcataaagtgtaaagcctggggtgcctaatgagtgagctaactcacattaattgcgttgcgctcactgcccgctttccagtcgggaaacctgtcgtgccagctgcattaatgaatcggccaacgcgcggggagaggcggtttgcgtattgggcgctcttccgcttcctcgctcactgactcgctgcgctcggtcgttcggctgcggcgagcggtatcagctcactcaaaggcggtaatacggttatccacagaatcaggggataacgcaggaaagaacatgtgagcaaaaggccagcaaaaggccaggaaccgtaaaaaggccgcgttgctggcgtttttccataggctccgcccccctgacgagcatcacaaaaatcgacgctcaagtcagaggtggcgaaacccgacaggactataaagataccaggcgtttccccctggaagctccctcgtgcgctctcctgttccgaccctgccgcttaccggatacctgtccgcctttctcccttcgggaagcgtggcgctttctcatagctcacgctgtaggtatctcagttcggtgtaggtcgttcgctccaagctgggctgtgtgcacgaaccccccgttcagcccgaccgctgcgccttatccggtaactatcgtcttgagtccaacccggtaagacacgacttatcgccactggcagcagccactggtaacaggattagcagagcgaggtatgtaggcggtgctacagagttcttgaagtggtggcctaactacggctacactagaagaacagtatttggtatctgcgctctgctgaagccagttaccttcggaaaaagagttggtagctcttgatccggcaaacaaaccaccgctggtagcggtggtttttttgtttgcaagcagcagattacgcgcagaaaaaaaggatctcaagaagatcctttgatcttttctacggggtctgacgctcagtggaacgaaaactcacgttaagggattttggtcatgagattatcaaaaaggatcttcacctagatccttttaaattaaaaatgaagttttaaatcaatctaaagtatatatgagtaaacttggtctgacagttaccaatgcttaatcagtgaggcacctatctcagcgatctgtctatttcgttcatccatagttgcctgactccccgtcgtgtagataactacgatacgggagggcttaccatctggccccagtgctgcaatgataccgcgagacccacgctcaccggctccagatttatcagcaataaaccagccagccggaagggccgagcgcagaagtggtcctgcaactttatccgcctccatccagtctattaattgttgccgggaagctagagtaagtagttcgccagttaatagtttgcgcaacgttgttgccattgctacaggcatcgtggtgtcacgctcgtcgtttggtatggcttcattcagctccggttcccaacgatcaaggcgagttacatgatcccccatgttgtgcaaaaaagcggttagctccttcggtcctccgatcgttgtcagaagtaagttggccgcagtgttatcactcatggttatggcagcactgcataattctcttactgtcatgccatccgtaagatgcttttctgtgactggtgagtactcaaccaagtcattctgagaatagtgtatgcggcgaccgagttgctcttgcccggcgtcaatacgggataataccgcgccacatagcagaactttaaaagtgctcatcattggaaaacgttcttcggggcgaaaactctcaaggatcttaccgctgttgagatccagttcgatgtaacccactcgtgcacccaactgatcttcagcatcttttactttcaccagcgtttctgggtgagcaaaaacaggaaggcaaaatgccgcaaaaaagggaataagggcgacacggaaatgttgaatactcatactcttcctttttcaatattattgaagcatttatcagggttattgtctcatgagcggatacatatttgaatgtatttagaaaaataaacaaataggggttccgcgcacatttccccgaaaagtgccacctgac

SEQ ID NO: 284 - DNA, 6459 bp, Artificial Sequence
  Chemically Synthesized
ggcgcccctgcaggcagctgcgcgctcgctcgctcactgaggccgcccgggcaaagcccgggcgtcgggcgacctttggtcgcccggcctcagtgagcgagcgagcgcgcagagagggagtggccaactccatcactaggggttcctgcggccgcggtaccgagggcctatttcccatgattccttcatatttgcatatacgatacaaggctgttagagagataattagaattaatttgactgtaaacacaaagatattagtacaaaatacgtgacgtagaaagtaataatttcttgggtagtttgcagttttaaaattatgttttaaaatggactatcatatgcttaccgtaacttgaaagtatttcgatttcttggctttatatatcttgtggaaaggacgaaacaccgagatcgaaagttggttggtttgttacctggttgtggaaggtccagtcttgaggggctattacaacgttcccgaaggtgtgacttccatgccaatggttgtggaaggtccagctttgaggggctattacaacgcgtggcctcggtgaaaatgtggtggctctgttgtggaaggtccagttttgaggggctattacaactttttttgaattcgctagctaggtcttgaaaggagtgggaattggctccggtgcccgtcagtgggcagagcgcacatcgcccacagtccccgagaagttggggggaggggtcggcaattgatccggtgcctagagaaggtggcgcggggtaaactgggaaagtgatgtcgtgtactggctccgcctttttcccgagggtgggggagaaccgtatataagtgcagtagtcgccgtgaacgttctttttcgcaacgggtttgccgccagaacacaggctcgagcgccaccatggactacaaagaccatgacggtgattataaagatcatgacatcgattacaaggatgacgatgacaagggatcccttcaactgcctccacttgaaagactgacactgggtagttccaacatccccgctctggtggaaaaccagaagaagtactttggcacctacagcgtgatggccatgctgaacgctcagaccgtgctggaccacatccagaaggtggccgatattgagggcgagcagaacgagaacaacgagaatctgtggtttcaccccgtgatgagccacctgtacaacgccaagaacggctacgacaagcagcccgagaaaaccatgttcatcatcgagcggctgcagagctacttcccattcctgaagatcatggccgagaaccagagagagtacagcaacggcaagtacaagcagaaccgcgtggaagtgaacagcaacgacatcttcgaggtgctgaagcgcgccttcggcgtgctgaagatgtacagggacctgaccaaccactacaagacctacgaggaaaagctgaacgacggctgcgagttcctgaccagcacagagcaacctctgagcggcatgatcaacaactactacacagtggccctgcggaacatgaacgagagatacggctacaagacagaggacctggccttcatccaggacaagcggttcaagttcgtgaaggacgcctacggcaagaaaaagtcccaagtgaataccggattcttcctgagcctgcaggactacaacggcgacacacagaagaagctgcacctgagcggagtgggaatcgccctgctgatctgcctgttcctggacaagcagtacatcaacatctttctgagcaggctgcccatcttctccagctacaatgcccagagcgaggaacggcggatcatcatcagatccttcggcatcaacagcatcaagctgcccaaggaccggatccacagcgagaagtccaacaagagcgtggccatggatatgctcaacgaagtgaagcggtgccccgacgagctgttcacaacactgtctgccgagaagcagtcccggttcagaatcatcagcgacgaccacaatgaagtgctgatgaagcggagcagcgacagattcgtgcctctgctgctgcagtatatcgattacggcaagctgttcgaccacatcaggttccacgtgaacatgggcaagctgagatacctgctgaaggccgacaagacctgcatcgacggccagaccagagtcagagtgatcgagcagcccctgaacggcttcggcagactggaagaggccgagacaatgcggaagcaagagaacggcaccttcggcaacagcggcatccggatcagagacttcgagaacatgaagcgggacgacgccaatcctgccaactatccctacatcgtggacacctacacacactacatcctggaaaacaacaaggtcgagatgtttatcaacgacaaagaggacagcgccccactgctgcccgtgatcgaggatgatagatacgtggtcaagacaatccccagctgccggatgagcaccctggaaattccagccatggccttccacatgtttctgttcggcagcaagaaaaccgagaagctgatcgtggacgtgcacaaccggtacaagagactgttccaggccatgcagaaagaagaagtgaccgccgagaatatcgccagcttcggaatcgccgagagcgacctgcctcagaagatcctggatctgatcagcggcaatgcccacggcaaggatgtggacgccttcatcagactgaccgtggacgacatgctgaccgacaccgagcggagaatcaagagattcaaggacgaccggaagtccattcggagcgccgacaacaagatgggaaagagaggcttcaagcagatctccacaggcaagctggccgacttcctggccaaggacatcgtgctgtttcagcccagcgtgaacgatggcgagaacaagatcaccggcctgaactaccggatcatgcagagcgccattgccgtgtacgatagcggcgacgattacgaggccaagcagcagttcaagctgatgttcgagaaggcccggctgatcggcaagggcacaacagagcctcatccatttctgtacaaggtgttcgcccgcagcatccccgccaatgccgtcgagttctacgagcgctacctgatcgagcggaagttctacctgaccggcctgtccaacgagatcaagaaaggcaacagagtggatgtgcccttcatccggcgggaccagaacaagtggaaaacacccgccatgaagaccctgggcagaatctacagcgaggatctgcccgtggaactgcccagacagatgttcgacaatgagatcaagtcccacctgaagtccctgccacagatggaaggcatcgacttcaacaatgccaacgtgacctatctgatcgccgagtacatgaagagagtgctggacgacgacttccagaccttctaccagtggaaccgcaactaccggtacatggacatgcttaagggcgagtacgacagaaagggctccctgcagcactgcttcaccagcgtggaagagagagaaggcctctggaaagagcgggcctccagaacagagcggtacagaaagcaggccagcaacaagatccgcagcaaccggcagatgagaaacgccagcagcgaagagatcgagacaatcctggataagcggctgagcaacagccggaacgagtaccagaaaagcgagaaagtgatccggcgctacagagtgcaggatgccctgctgtttctgctggccaaaaagaccctgaccgaactggccgatttcgacggcgagaggttcaaactgaaagaaatcatgcccgacgccgagaagggaatcctgagcgagatcatgcccatgagcttcaccttcgagaaaggcggcaagaagtacaccatcaccagcgagggcatgaagctgaagaactacggcgacttctttgtgctggctagcgacaagaggatcggcaacctgctggaactcgtgggcagcgacatcgtgtccaaagaggatatcatggaagagttcaacaaatacgaccagtgcaggcccgagatcagctccatcgtgttcaacctggaaaagtgggccttcgacacataccccgagctgtctgccagagtggaccgggaagagaaggtggacttcaagagcatcctgaaaatcctgctgaacaacaagaacatcaacaaagagcagagcgacatcctgcggaagatccggaacgccttcgatcacaacaattaccccgacaaaggcgtggtggaaatcaaggccctgcctgagatcgccatgagcatcaagaaggcctttggggagtacgccatcatgaagtagtaatctagaaattcctagagctcgctgatcagcctcgactgtgccttctagttgccagccatctgttgtttgcccctcccccgtgccttccttgaccctggaaggtgccactcccactgtcctttcctaataaaatgaggaaattgcatcgcattgtctgagtaggtgtcattctattctggggggtggggtggggcaggacagcaagggggaggattgggaagagaatagcaggcatgctggggagctagaggccgcaggaacccctagtgatggagttggccactccctctctgcgcgctcgctcgctcactgaggccgggcgaccaaaggtcgcccgacgcccgggcggcctcagtgagcgagcgagcgcgcagctgcctgcaggacatgtatagctagactgggcggttttatggacagcaagcgaacgcggaacccctatttgtttatttttctaaatacattcaaatatgtatccgctcatgagacaataaccctgataaatgcttcaataatattgaaaaaggaagagtatgagtattcaacatttccgtgtcgcccttattcccttttttgcggcattttgccttcctgtttttgctcacccagaaacgctggtgaaagtaaaagatgctgaagatcagttgggtgcacgagtgggttacatcgaactggatctcaacagcggtaagatccttgagagttttcgccccgaagaacgttttccaatgatgagcacttttaaagttctgctatgtggcgcggtattatcccgtattgacgccgggcaagagcaactcggtcgccgcatacactattctcagaatgacttggttgagtactcaccagtcacagaaaagcatcttacggatggcatgacagtaagagaattatgcagtgctgccataaccatgagtgataacactgcggccaacttacttctgacaacgatcggaggaccgaaggagctaaccgcttttttgcacaacatgggggatcatgtaactcgccttgatcgttgggaaccggagctgaatgaagccataccaaacgacgagcgtgacaccacgatgcctgtagcaatggcaacaacgttgcgcaaactattaactggcgaactacttactctagcttcccggcaacaattaatagactggatggaggcggataaagttgcaggaccacttctgcgctcggcccttccggctggctggtttattgctgataaatctggagccggtgagcgtgggtctcgcggtatcattgcagcactggggccagatggtaagccctcccgtatcgtagttatctacacgacggggagtcaggcaactatggatgaacgaaatagacagatcgctgagataggtgcctcactgattaagcattggtaactttagattgatttaaaacttcatttttaatttaaaaggatctaggtgaagatcctttttgataatctcatgaccaaaatcccttaacgtgagttttcgttccactgagcgtcagaccccgtagaaaagatcaaaggatcttcttgagatcctttttttctgcgcgtaatctgctgcttgcaaacaaaaaaaccaccgctaccagcggtggtttgtttgccggatcaagagctaccaactctttttccgaaggtaactggcttcagcagagcgcagataccaaatactgttcttctagtgtagccgtagttaggccaccacttcaagaactctgtagcaccgcctacatacctcgctctgctaatcctgttaccagtggctgctgccagtggcgataagtcgtgtcttaccgggttggactcaagacgatagttaccggataaggcgcagcggtcgggctgaacggggggttcgtgcacacagcccagcttggagcgaacgacctacaccgaactgagatacctacagcgtgagctatgagaaagcgccacgcttcccgaagggagaaaggcggacaggtatccggtaagcggcagggtcggaacaggagagcgcacgagggagcttccagggggaaacgcctggtatctttatagtcctgtcgggtttcgccacctctgacttgagcgtcgatttttgtgatgctcgtcaggggggcggagcctatggaaaaacgccagcaacgcggcctttttacggttcctggccttttgctggaa

SEQ ID NO: 285 - DNA, 2153 bp, Artificial Sequence
  Chemically Synthesized
tgcatctcaattagtcagcaaccatagtcccgcccctaactccgcccatcccgcccctaactccgcccagttccgcccattctccgccccatcgctgactaattttttttatttatgcagaggccgaggccgcctcggcctctgagctattccagaagtagtgaggaggcttttttggaggcctaggcttttgcaaaaagcttggcattccggtactgttggtaaagccaccatggaagacgccaaaaacataaagaaaggcccggcgccattctatccgctggaagatggaaccgctggagagcaactgcataaggctatgaagagatacgccctggttcctggaacaattgcttttacagatgcacatatcgaggtggacatcacttacgctgagtacttcgaaatgtccgttcggttggcagaagctatgaaacgatatgggctgaatacaaatcacagaatcgtcgtatgcagtgaaaactctcttcaattctttatgccggtgttgggcgcgttatttatcggagttgcagttgcgcccgcgaacgacatttataatgaacgtgaattgctcaacagtatgggcatttcgcagcctaccgtggtgttcgtttccaaaaaggggttgcaaaaaattttgaacgtgcaaaaaaagctcccaatcatccaaaaaattattatcatggattctaaaacggattaccagggatttcagtcgatgtacacgttcgtcacatctcatctacctcccggttttaatgaatacgattttgtgccagagtccttcgatagggacaagacaattgcactgatcatgaactcctctggatctactggtctgcctaaaggtgtcgctctgcctcatagaactgcctgcgtgagattctcgcatgccagagatcctatttttggcaatcaaatcattccggatactgcgattttaagtgttgttccattccatcacggttttggaatgtttactacactcggatatttgatatgtggatttcgagtcgtcttaatgtatagatttgaagaagagctgtttctgaggagccttcaggattacaagattcaaagtgcgctgctggtgccaaccctattctccttcttcgccaaaagcactctgattgacaaatacgatttatctaatttacacgaaattgcttctggtggcgctcccctctctaaggaagtcggggaagcggttgccaagaggttccatctgccaggtatcaggcaaggatatgggctcactgagactacatcagctattctgattacacccgagggggatgataaaccgggcgcggtcggtaaagttgttccattttttgaagcgaaggttgtggatctggataccgggaaaacgctgggcgttaatcaaagaggcgaactgtgtgtgagaggtcctatgattatgtccggttatgtaaacaatccggaagcgaccaacgccttgattgacaaggatggatggctacattctggagacatagcttactgggacgaagacgaacacttcttcatcgttgaccgcctgaagtctctgattaagtacaaaggctatcaggtggctcccgctgaattggaatccatcttgctccaacaccccaacatcttcgacgcaggtgtcgcaggtcttcccgacgatgacgccggtgaacttcccgccgccgttgttgttttggagcacggaaagacgatgacggaaaaagagatcgtggattacgtcgccagtcaagtaacaaccgcgaaaaagttgcgcggaggagttgtgtttgtggacgaagtaccgaaaggtcttaccggaaaactcgacgcaagaaaaatcagagagatcctcataaaggccaagaagggcggaaagatcgccgtgtaattctagagtcggggcggccggccgcttcgagcagacatgataagatacattgatgagtttggacaaaccacaactagaatgcagtgaaaaaaatgctttatttgtgaaatttgtgatgctattgctttatttgtaaccattataagctgcaataaacaagttaacaacaacaattgcattcattttatgtttcaggttcagggggaggtgtgggaggttttttaaagcaagtaaaacctctacaaatgtggtaaaatcgataaggatc

SEQ ID NO: 286 - DNA, 2394 bp, Artificial Sequence
  Chemically Synthesized
tgcatctcaattagtcagcaaccatagtcccgcccctaactccgcccatcccgcccctaactccgcccagttccgcccattctccgccccatcgctgactaattttttttatttatgcagaggccgaggccgcctcggcctctgagctattccagaagtagtgaggaggcttttttggaggcctaggcttttgcaaaaagcttggcattccggtactgttggtaaagccaccatggaagacgccaaaaacataaagaaaggcccggcgccattctatccgctggaagatggaaccgctggagagcaactgcataaggctatgaagagatacgccctggttcctggaacaattgcttttacagatgcacatatcgaggtggacatcacttacgctgagtacttcgaaatgtccgttcggttggcagaagctatgaaacgatatgggctgaatacaaatcacagaatcgtcgtatgcagtgaaaactctcttcaattctttatgccggtgttgggcgcgttatttatcggagttgcagttgcgcccgcgaacgacatttataatgaacgtgaattgctcaacagtatgggcatttcgcagcctaccgtggtgttcgtttccaaaaaggggttgcaaaaaattttgaacgtgcaaaaaaagctcccaatcatccaaaaaattattatcatggattctaaaacggattaccagggatttcagtcgatgtacacgttcgtcacatctcatctacctcccggttttaatgaatacgattttgtgccagagtccttcgatagggacaagacaattgcactgatcatgaactcctctggatctactggtctgcctaaaggtgtcgctctgcctcatagaactgcctgcgtgagattctcgcatgccagagatcctatttttggcaatcaaatcattccggatactgcgattttaagtgttgttccattccatcacggttttggaatgtttactacactcggatatttgatatgtggatttcgagtcgtcttaatgtatagatttgaagaagagctgtttctgaggagccttcaggattacaagattcaaagtgcgctgctggtgccaaccctattctccttcttcgccaaaagcactctgattgacaaatacgatttatctaatttacacgaaattgcttctggtggcgctcccctctctaaggaagtcggggaagcggttgccaagaggttccatctgccaggtatcaggcaaggatatgggctcactgagactacatcagctattctgattacacccgagggggatgataaaccgggcgcggtcggtaaagttgttccattttttgaagcgaaggttgtggatctggataccgggaaaacgctgggcgttaatcaaagaggcgaactgtgtgtgagaggtcctatgattatgtccggttatgtaaacaatccggaagcgaccaacgccttgattgacaaggatggatggctacattctggagacatagcttactgggacgaagacgaacacttcttcatcgttgaccgcctgaagtctctgattaagtacaaaggctatcaggtggctcccgctgaattggaatccatcttgctccaacaccccaacatcttcgacgcaggtgtcgcaggtcttcccgacgatgacgccggtgaacttcccgccgccgttgttgttttggagcacggaaagacgatgacggaaaaagagatcgtggattacgtcgccagtcaagtaacaaccgcgaaaaagttgcgcggaggagttgtgtttgtggacgaagtaccgaaaggtcttaccggaaaactcgacgcaagaaaaatcagagagatcctcataaaggccaagaagggcggaaagatcgccgtgtaattctagagtcggggcggccggccgcttcgagcagacatgataagatacattgatgagtttggacaaaccacaactagaatgcagtgaaaaaaatgctttatttgtgaaatttgtgatgctattgctttatttgtaaccattataagctgcaataaacaagttaacaacaacaattgcattcattttatgtttcaggttcagggggaggtgtgggaggttttttaaagcaagtaaaacctctacaaatgtggtaaaatcgataaggatctgaacgatggagcggagaatgggcggaactgggcggagttaggggcgggatgggcggagttaggggcgggactatggttgctgactaattgagatgcatgctttgcatacttctgcctgctggggagcctggggactttccacacctggttgctgactaattgagatgcatgctttgcatacttctgcctgctggggagcctggggactttccacaccctaactgacacacattccacagc

SEQ ID NO: 287 - DNA, 2565 bp, Artificial Sequence
  Chemically Synthesized
tgcatctcaattagtcagcaaccatagtcccgcccctaactccgcccatcccgcccctaactccgcccagttccgcccattctccgccccatcgctgactaattttttttatttatgcagaggccgaggccgcctcggcctctgagctattccagaagtagtgaggaggcttttttggaggcctaggcttttgcaaaaagcttggcattccggtactgttggtaaagccaccatggaagacgccaaaaacataaagaaaggcccggcgccattctatccgctggaagatggaaccgctggagagcaactgcataaggctatgaagagatacgccctggttcctggaacaattgcttttacagatgcacatatcgaggtggacatcacttacgctgagtacttcgaaatgtccgttcggttggcagaagctatgaaacgatatgggctgaatacaaatcacagaatcgtcgtatgcagtgaaaactctcttcaattctttatgccggtgttgggcgcgttatttatcggagttgcagttgcgcccgcgaacgacatttataatgaacgtgaattgctcaacagtatgggcatttcgcagcctaccgtggtgttcgtttccaaaaaggggttgcaaaaaattttgaacgtgcaaaaaaagctcccaatcatccaaaaaattattatcatggattctaaaacggattaccagggatttcagtcgatgtacacgttcgtcacatctcatctacctcccggttttaatgaatacgattttgtgccagagtccttcgatagggacaagacaattgcactgatcatgaactcctctggatctactggtctgcctaaaggtgtcgctctgcctcatagaactgcctgcgtgagattctcgcatgccagagatcctatttttggcaatcaaatcattccggatactgcgattttaagtgttgttccattccatcacggttttggaatgtttactacactcggatatttgatatgtggatttcgagtcgtcttaatgtatagatttgaagaagagctgtttctgaggagccttcaggattacaagattcaaagtgcgctgctggtgccaaccctattctccttcttcgccaaaagcactctgattgacaaatacgatttatctaatttacacgaaattgcttctggtggcgctcccctctctaaggaagtcggggaagcggttgccaagaggttccatctgccaggtatcaggcaaggatatgggctcactgagactacatcagctattctgattacacccgagggggatgataaaccgggcgcggtcggtaaagttgttccattttttgaagcgaaggttgtggatctggataccgggaaaacgctgggcgttaatcaaagaggcgaactgtgtgtgagaggtcctatgattatgtccggttatgtaaacaatccggaagcgaccaacgccttgattgacaaggatggatggctacattctggagacatagcttactgggacgaagacgaacacttcttcatcgttgaccgcctgaagtctctgattaagtacaaaggctatcaggtggctcccgctgaattggaatccatcttgctccaacaccccaacatcttcgacgcaggtgtcgcaggtcttcccgacgatgacgccggtgaacttcccgccgccgttgttgttttggagcacggaaagacgatgacggaaaaagagatcgtggattacgtcgccagtcaagtaacaaccgcgaaaaagttgcgcggaggagttgtgtttgtggacgaagtaccgaaaggtcttaccggaaaactcgacgcaagaaaaatcagagagatcctcataaaggccaagaagggcggaaagatcgccgtggcttgcaagaactggttcagtagcttaagccactttgtgatccaccttaacagccacggcttccctcccgaggtggaggagcaggccgccggcaccctgcccatgagctgcgcccaggagagcggcatggatagacaccctgctgcttgcgccagcgccaggatcaacgtctaattctagagtcggggcggccggccgcttcgagcagacatgataagatacattgatgagtttggacaaaccacaactagaatgcagtgaaaaaaatgctttatttgtgaaatttgtgatgctattgctttatttgtaaccattataagctgcaataaacaagttaacaacaacaattgcattcattttatgtttcaggttcagggggaggtgtgggaggttttttaaagcaagtaaaacctctacaaatgtggtaaaatcgataaggatctgaacgatggagcggagaatgggcggaactgggcggagttaggggcgggatgggcggagttaggggcgggactatggttgctgactaattgagatgcatgctttgcatacttctgcctgctggggagcctggggactttccacacctggttgctgactaattgagatgcatgctttgcatacttctgcctgctggggagcctggggactttccacaccctaactgacacacattccacagc

SEQ ID NO: 288 - DNA, 36 bp, Artificial Sequence
  Chemically Synthesized
cgaaaacgggactctagcatacttactgacagccag

SEQ ID NO: 289 - DNA, 36 bp, Artificial Sequence
  Chemically Synthesized
tctgagatcatgaagatctgttccaccattgaagaa

SEQ ID NO: 290 - DNA, 36 bp, Artificial Sequence
  Chemically Synthesized
aggagtgcctgattaatgatccctgggttttgctca

SEQ ID NO: 291 - DNA, 36 bp, Artificial Sequence
  Chemically Synthesized
tgaagggtcttatttcttcggagacaatgcagagga

SEQ ID NO: 292 - DNA, 36 bp, Artificial Sequence
  Chemically Synthesized
ccgtcaggccccctcaaagccgagatcgcgcagaga

SEQ ID NO: 293 - DNA, 36 bp, Artificial Sequence
  Chemically Synthesized
ctggctgtcagtaagtatgctagagtcccgttttcg

SEQ ID NO: 294 - DNA, 36 bp, Artificial Sequence
  Chemically Synthesized
gttcttcaatggtggaacagatcttcatgatctcag

SEQ ID NO: 295 - DNA, 36 bp, Artificial Sequence
  Chemically Synthesized
caaaacccagggatcattaatcaggcactcctcgat

SEQ ID NO: 296 - DNA, 36 bp, Artificial Sequence
  Chemically Synthesized
tcctctgcattgtctccgaagaaataagatccttca

SEQ ID NO: 297 - DNA, 36 bp, Artificial Sequence
  Chemically Synthesized
tctctgcgcgatctcggctttgagggggcctgacgg

SEQ ID NO: 298 - protein, 243 aa, Artificial Sequence
  Chemically Synthesized
QEIIASVDHIKFDLEIAVEQQLGAQPLPFPGMDKSGAAVCEFFLKAACGKGGMCPFRHISGEKTVVCKHWLRGLCKKGDQCEFLHEYDMTKMPECYFYSKFGECSNKECPFLHIDPESKIKDCPWYDRGFCKHGPLCRHRHTRRVICVNYLVGFCPEGPSCKFMHPRFELPMGTTEQPPLPQQTQPPAKQRTPQVIGVMQSQNSSAGNRGPRPLEQVTCYKCGEKGHYANRCTKGHLAFLSGQ

SEQ ID NO: 299 - protein, 567 aa, Artificial Sequence
  Chemically Synthesized
GSPPRFFHMPRFQHQAPRQLFYKRPDFAQQQAMQQLTFDGKRMRKAVNRKTIDYNPSVIKYLENRIWQRDQRDMRAIQPDAGYYNDLVPPIGMLNNPMNAVTTKFVRTSTNKVKCPVFVVRWTPEGRRLVTGASSGEFTLWNGLTFNFETILQAHDSPVRAMTWSHNDMWMLTADHGGYVKYWQSNMNNVKMFQAHKEAIREASFSPTDNKFATCSDDGTVRIWDFLRCHEERILRGHGADVKCVDWHPTKGLVVSGSKDSQQPIKFWDPKTGQSLATLHAHKNTVMEVKLNLNGNWLLTASRDHLCKLFDIRNLKEELQVFRGHKKEATAVAWHPVHEGLFASGGSDGSLLFWHVGVEKEVGGMEMAHEGMIWSLAWHPLGHILCSGSNDHTSKFWTRNRPGDKMRDRYNLNLLPGMSEDGVEYDDLEPNSLAVIPGMGIPEQLKLAMEQEQMGKDESNEIEMTIPGLDWGMEEVMQKDQKKVPQKKVPYAKPIPAQFQQAWMQNKVPIPAPNEVLNDRKEDIKLEEKKKTQAEIEQEMATLQYTNPQLLEQLKIERLAQKQVEQI

SEQ ID NO: 300 - protein, 226 aa, Artificial Sequence
  Chemically Synthesized
SVVPPNRSQTGWPRGVTQFGNKYIQQTKPLTLERTINLYPLTNYTFGTKEPLYEKDSSVAARFQRMREEFDKIGMRRTVEGVLIVHEHRLPHVLLLQLGTTFFKLPGGELNPGEDEVEGLKRLMTEILGRQDGVLQDWVIDDCIGNWWRPNFEPPQYPYIPAHITKPKEHKKLFLVQLQEKALFAVPKNYKLVAAPLFELYDNAPGYGPIISSLPQLLSRFNFIYN

SEQ ID NO: 301 - protein, 227 aa, Artificial Sequence
  Chemically Synthesized
MEDIWPTIERTTISASVPEAPANFDEKPPFNRTINVYPLTNYTFGTKDAQAEKDKSVPERFKRMKDEYEVMGMRRSVEAVLIVHEHSLPHILLLQIGTTFYKLPGGELELGEDEISGVTRLLNETLGRTDGETNEWTIEDEIGNWWRPNFDPPRYPYIPAHVTKPKEHTKLLLVQLPSKSTFCVPKNFKLVAAPLFELYDNAAAYGPLISSLPTTLSRFNFIFNDSN

SEQ ID NO: 302 - protein, 237 aa, Artificial Sequence
  Chemically Synthesized
MASSQVSNKSGSGWPRRGSQGQADAASSNNNGTQKYTNQALTINRTINLYPLTNYTFGTKEPLFEKDPSVPSRFQRMREEFDRIGMRRSVEGVLLVHEHGLPHVLLLQLGTTFFKLPGGELNAGEDEVEGLKRLLSETLGRQDGVKQEWIVEDTIGNWWRPNFEPPQYPYIPPHITKPKEHKRLFLVQLHEKALFAVPKNYKLVAAPLFELYDNSQGYGPIISSLPQALCRFNFIYM

SEQ ID NO: 303 - protein, 228 aa, Artificial Sequence
  Chemically Synthesized
MSVVPPNRSSTGWPRGVNQFGNKYITQATKPLTLERTINLYPLTNYTFGTKEPLYEKDSSVAARFQRMREEFEKIGMRRTVEGVLIVHEHRLPHVLLLQLGTTFFKLPGGELNPGEDEVEGLKRLMTEILGRQDGVKQDWVIDDCIGNWWRPNFEPPQYPYIPAHITKPKEHKKLFLVQLQEKALFAVPKNYKLVAAPLFELYDNAPGYGPIISSLPQLLSRFNFIYN

SEQ ID NO: 304 - protein, 197 aa, Artificial Sequence
  Chemically Synthesized
LTLERTINLYPLTNYTFGTKEPLYEKDSSVAARFQRMREEFDKIGMRRTVEGVLIVHEHRLPHVLLLQLGTTFFKLPGGELNPGEDEVEGLKRLMTEILGRQDGVLQDWVIDDCIGNWWRPNFEPPQYPYIPAHITKPKEHKKLFLVQLQEKALFAVPKNYKLVAAPLFELYDNAPGYGPIISSLPQLLSRFNFIYN

SEQ ID NO: 305 - protein, 226 aa, Artificial Sequence
  Chemically Synthesized
SVVPPNRSQTGWPRGVTQFGNKYIQQTKPLTLERTINLYPLTNYTFGTKEPLYEKDSSVAASFQRMREEFDKIGMRRTVEGVLIVHEHRLPHVLLLQLGTTFFKLPGGELNPGEDEVEGLKRLMTEILGRQDGVLQDWVIDDCIGNWWRPNFEPPQYPYIPAHITKPKEHKKLFLVQLQEKALFAVPKNYKLVAAPLFELYDNAPGYGPIISSLPQLLSRFNFIYN

SEQ ID NO: 306 - protein, 226 aa, Artificial Sequence
  Chemically Synthesized
SVVPPNRSQTGWPRGVTQFGNKYIQQTKPLTLERTINLYPLTNYTFGTKEPLYEKDSSVAARFQRMREEFDKIGMRRTVEGVLIVHEHRLPHVLLLQLGTTAFKLPGGELNPGEDEVEGLKRLMTEILGRQDGVLQDWVIDDCIGNWWRPNFEPPQYPYIPAHITKPKEHKKLFLVQLQEKALFAVPKNYKLVAAPLFELYDNAPGYGPIISSLPQLLSRFNFIYN

SEQ ID NO: 307 - protein, 462 aa, Artificial Sequence
  Chemically Synthesized
SVVPPNRSQTGWPRGVTQFGNKYIQQTKPLTLERTINLYPLTNYTFGTKEPLYEKDSSVAARFQRMREEFDKIGMRRTVEGVLIVHEHRLPHVLLLQLGTTFFKLPGGELNPGEDEVEGLKRLMTEILGRQDGVLQDWVIDDCIGNWWRPNFEPPQYPYIPAHITKPKEHKKLFLVQLQEKALFAVPKNYKLVAAPLFELYDNAPGYGPIISSLPQLLSRFNFIYNGGGGSGGGGSSVVPPNRSQTGWPRGVTQFGNKYIQQTKPLTLERTINLYPLTNYTFGTKEPLYEKDSSVAARFQRMREEFDKIGMRRTVEGVLIVHEHRLPHVLLLQLGTTFFKLPGGELNPGEDEVEGLKRLMTEILGRQDGVLQDWVIDDCIGNWWRPNFEPPQYPYIPAHITKPKEHKKLFLVQLQEKALFAVPKNYKLVAAPLFELYDNAPGYGPIISSLPQLLSRFNFIYN

SEQ ID NO: 308 - protein, 1412 aa, Artificial Sequence
  Chemically Synthesized
MDYKDHDGDYKDHDIDYKDDDDKGGNSKKRSLEDNETEIKVSRDTWNTKNMRSLEPPRSKKRIHGGNIPALVENQKKYFGTYSVMAMLNAQTVLDHIQKVADIEGEQNENNENLWFHPVMSHLYNAKNGYDKQPEKTMFIIERLQSYFPFLKIMAENQREYSNGKYKQNRVEVNSNDIFEVLKRAFGVLKMYRDLTNAYKTYEEKLNDGCEFLTSTEQPLSGMINNYYTVALRNMNERYGYKTEDLAFIQDKRFKFVKDAYGKKKSQVNTGFFLSLQDYNGDTQKKLHLSGVGIALLICLFLDKQYINIFLSRLPIFSSYNAQSEERRIIIRSFGINSIKLPKDRIHSEKSNKSVAMDMLNEVKRCPDELFTTLSAEKQSRFRIISDDHNEVLMKRSSDRFVPLLLQYIDYGKLFDHIRFHVNMGKLRYLLKADKTCIDGQTRVRVIEQPLNGFGRLEEAETMRKQENGTFGNSGIRIRDFENMKRDDANPANYPYIVDTYTHYILENNKVEMFINDKEDSAPLLPVIEDDRYVVKTIPSCRMSTLEIPAMAFHMFLFGSKKTEKLIVDVHNRYKRLFQAMQKEEVTAENIASFGIAESDLPQKILDLISGNAHGKDVDAFIRLTVDDMLTDTERRIKRFKDDRKSIRSADNKMGKRGFKQISTGKLADFLAKDIVLFQPSVNDGENKITGLNYRIMQSAIAVYDSGDDYEAKQQFKLMFEKARLIGKGTTEPHPFLYKVFARSIPANAVEFYERYLIERKFYLTGLSNEIKKGNRVDVPFIRRDQNKWKTPAMKTLGRIYSEDLPVELPRQMFDNEIKSHLKSLPQMEGIDFNNANVTYLIAEYMKRVLDDDFQTFYQWNRNYRYMDMLKGEYDRKGSLQHCFTSVEEREGLWKERASRTERYRKQASNKIRSNRQMRNASSEEIETILDKRLSNSRNEYQKSEKVIRRYRVQDALLFLLAKKTLTELADFDGERFKLKEIMPDAEKGILSEIMPMSFTFEKGGKKYTITSEGMKLKNYGDFFVLASDKRIGNLLELVGSDIVSKEDIMEEFNKYDQCRPEISSIVFNLEKWAFDTYPELSARVDREEKVDFKSILKILLNNKNINKEQSDILRKIRNAFDANNYPDKGVVEIKALPEIAMSIKKAFGEYAIMKSRGGGGSGGGGSTRQEIIASVDHIKFDLEIAVEQQLGAQPLPFPGMDKSGAAVCEFFLKAACGKGGMCPFRHISGEKTVVCKHWLRGLCKKGDQCEFLHEYDMTKMPECYFYSKFGECSNKECPFLHIDPESKIKDCPWYDRGFCKHGPLCRHRHTRRVICVNYLVGFCPEGPSCKFMHPRFELPMGTTEQPPLPQQTQPPAKQRTPQVIGVMQSQNSSAGNRGPRPLEQVTCYKCGEKGHYANRCTKGHLAFLSGQ

SEQ ID NO: 309 - protein, 1736 aa, Artificial Sequence
  Chemically Synthesized
MDYKDHDGDYKDHDIDYKDDDDKGGNSKKRSLEDNETEIKVSRDTWNTKNMRSLEPPRSKKRIHGGNIPALVENQKKYFGTYSVMAMLNAQTVLDHIQKVADIEGEQNENNENLWFHPVMSHLYNAKNGYDKQPEKTMFIIERLQSYFPFLKIMAENQREYSNGKYKQNRVEVNSNDIFEVLKRAFGVLKMYRDLTNAYKTYEEKLNDGCEFLTSTEQPLSGMINNYYTVALRNMNERYGYKTEDLAFIQDKRFKFVKDAYGKKKSQVNTGFFLSLQDYNGDTQKKLHLSGVGIALLICLFLDKQYINIFLSRLPIFSSYNAQSEERRIIIRSFGINSIKLPKDRIHSEKSNKSVAMDMLNEVKRCPDELFTTLSAEKQSRFRIISDDHNEVLMKRSSDRFVPLLLQYIDYGKLFDHIRFHVNMGKLRYLLKADKTCIDGQTRVRVIEQPLNGFGRLEEAETMRKQENGTFGNSGIRIRDFENMKRDDANPANYPYIVDTYTHYILENNKVEMFINDKEDSAPLLPVIEDDRYVVKTIPSCRMSTLEIPAMAFHMFLFGSKKTEKLIVDVHNRYKRLFQAMQKEEVTAENIASFGIAESDLPQKILDLISGNAHGKDVDAFIRLTVDDMLTDTERRIKRFKDDRKSIRSADNKMGKRGFKQISTGKLADFLAKDIVLFQPSVNDGENKITGLNYRIMQSAIAVYDSGDDYEAKQQFKLMFEKARLIGKGTTEPHPFLYKVFARSIPANAVEFYERYLIERKFYLTGLSNEIKKGNRVDVPFIRRDQNKWKTPAMKTLGRIYSEDLPVELPRQMFDNEIKSHLKSLPQMEGIDFNNANVTYLIAEYMKRVLDDDFQTFYQWNRNYRYMDMLKGEYDRKGSLQHCFTSVEEREGLWKERASRTERYRKQASNKIRSNRQMRNASSEEIETILDKRLSNSRNEYQKSEKVIRRYRVQDALLFLLAKKTLTELADFDGERFKLKEIMPDAEKGILSEIMPMSFTFEKGGKKYTITSEGMKLKNYGDFFVLASDKRIGNLLELVGSDIVSKEDIMEEFNKYDQCRPEISSIVFNLEKWAFDTYPELSARVDREEKVDFKSILKILLNNKNINKEQSDILRKIRNAFDANNYPDKGVVEIKALPEIAMSIKKAFGEYAIMKSRGGGGSGGGGSTRGSPPRFFHMPRFQHQAPRQLFYKRPDFAQQQAMQQLTFDGKRMRKAVNRKTIDYNPSVIKYLENRIWQRDQRDMRAIQPDAGYYNDLVPPIGMLNNPMNAVTTKFVRTSTNKVKCPVFVVRWTPEGRRLVTGASSGEFTLWNGLTFNFETILQAHDSPVRAMTWSHNDMWMLTADHGGYVKYWQSNMNNVKMFQAHKEAIREASFSPTDNKFATCSDDGTVRIWDFLRCHEERILRGHGADVKCVDWHPTKGLVVSGSKDSQQPIKFWDPKTGQSLATLHAHKNTVMEVKLNLNGNWLLTASRDHLCKLFDIRNLKEELQVFRGHKKEATAVAWHPVHEGLFASGGSDGSLLFWHVGVEKEVGGMEMAHEGMIWSLAWHPLGHILCSGSNDHTSKFWTRNRPGDKMRDRYNLNLLPGMSEDGVEYDDLEPNSLAVIPGMGIPEQLKLAMEQEQMGKDESNEIEMTIPGLDWGMEEVMQKDQKKVPQKKVPYAKPIPAQFQQAWMQNKVPIPAPNEVLNDRKEDIKLEEKKKTQAEIEQEMATLQYTNPQLLEQLKIERLAQKQVEQI

SEQ ID NO: 310 - protein, 1395 aa, Artificial Sequence
  Chemically Synthesized
MDYKDHDGDYKDHDIDYKDDDDKGGNSKKRSLEDNETEIKVSRDTWNTKNMRSLEPPRSKKRIHGGNIPALVENQKKYFGTYSVMAMLNAQTVLDHIQKVADIEGEQNENNENLWFHPVMSHLYNAKNGYDKQPEKTMFIIERLQSYFPFLKIMAENQREYSNGKYKQNRVEVNSNDIFEVLKRAFGVLKMYRDLTNAYKTYEEKLNDGCEFLTSTEQPLSGMINNYYTVALRNMNERYGYKTEDLAFIQDKRFKFVKDAYGKKKSQVNTGFFLSLQDYNGDTQKKLHLSGVGIALLICLFLDKQYINIFLSRLPIFSSYNAQSEERRIIIRSFGINSIKLPKDRIHSEKSNKSVAMDMLNEVKRCPDELFTTLSAEKQSRFRIISDDHNEVLMKRSSDRFVPLLLQYIDYGKLFDHIRFHVNMGKLRYLLKADKTCIDGQTRVRVIEQPLNGFGRLEEAETMRKQENGTFGNSGIRIRDFENMKRDDANPANYPYIVDTYTHYILENNKVEMFINDKEDSAPLLPVIEDDRYVVKTIPSCRMSTLEIPAMAFHMFLFGSKKTEKLIVDVHNRYKRLFQAMQKEEVTAENIASFGIAESDLPQKILDLISGNAHGKDVDAFIRLTVDDMLTDTERRIKRFKDDRKSIRSADNKMGKRGFKQISTGKLADFLAKDIVLFQPSVNDGENKITGLNYRIMQSAIAVYDSGDDYEAKQQFKLMFEKARLIGKGTTEPHPFLYKVFARSIPANAVEFYERYLIERKFYLTGLSNEIKKGNRVDVPFIRRDQNKWKTPAMKTLGRIYSEDLPVELPRQMFDNEIKSHLKSLPQMEGIDFNNANVTYLIAEYMKRVLDDDFQTFYQWNRNYRYMDMLKGEYDRKGSLQHCFTSVEEREGLWKERASRTERYRKQASNKIRSNRQMRNASSEEIETILDKRLSNSRNEYQKSEKVIRRYRVQDALLFLLAKKTLTELADFDGERFKLKEIMPDAEKGILSEIMPMSFTFEKGGKKYTITSEGMKLKNYGDFFVLASDKRIGNLLELVGSDIVSKEDIMEEFNKYDQCRPEISSIVFNLEKWAFDTYPELSARVDREEKVDFKSILKILLNNKNINKEQSDILRKIRNAFDANNYPDKGVVEIKALPEIAMSIKKAFGEYAIMKSRGGGGSGGGGSTRSVVPPNRSQTGWPRGVTQFGNKYIQQTKPLTLERTINLYPLTNYTFGTKEPLYEKDSSVAARFQRMREEFDKIGMRRTVEGVLIVHEHRLPHVLLLQLGTTFFKLPGGELNPGEDEVEGLKRLMTEILGRQDGVLQDWVIDDCIGNWWRPNFEPPQYPYIPAHITKPKEHKKLFLVQLQEKALFAVPKNYKLVAAPLFELYDNAPGYGPIISSLPQLLSRFNFIYN

SEQ ID NO: 311 - DNA, 729 bp, Artificial Sequence
  Chemically Synthesized
caggaaatcatcgccagcgtggaccacatcaagtttgacttggagatcgcggtggagcagcagctgggggcgcagccgctgcccttccccggcatggacaagtcgggcgctgctgtctgtgaattctttttgaaagctgcctgcggcaaagggggcatgtgtccgtttcgccacatcagtggtgagaaaacagttgtgtgcaaacactggctgcgtggcctatgcaagaaaggggaccagtgtgagttcctgcatgagtatgacatgaccaagatgcccgagtgctacttctactccaagttcggggagtgcagcaacaaggaatgtcccttcctgcacatcgaccccgagtccaagatcaaggactgtccttggtatgaccgtggcttctgcaagcacggtcccctctgcaggcaccggcacacacggagagtcatctgtgtgaattacctcgtgggattctgcccggaggggccctcgtgtaaattcatgcaccctcgatttgaactgcccatgggaaccaccgagcagcccccactgccgcagcagacacagcctccagcaaagcagagaaccccgcaggtcatcggggtcatgcagagtcaaaacagcagcgcgggcaaccggggaccccggccactggagcaggtcacctgttacaagtgtggcgagaaaggacactacgccaacagatgcaccaaagggcacttggcctttctcagtggacag

SEQ ID NO: 312 - DNA, 1701 bp, Artificial Sequence
  Chemically Synthesized
ggctcaccccctcgattcttccacatgccgcgctttcaacaccaagcccccaggcaactcttttacaaacgcccagactttgcgcagcagcaggcgatgcagcagcttactttcgacggaaagcgcatgcgaaaagcggtcaaccgcaagacaatagattacaatcccagtgtcattaaatacctcgagaatcgcatatggcaaagagatcaacgagacatgagagccattcaaccggatgcaggttattacaatgatctggtccctccgatcggcatgttgaataatccaatgaacgctgtcacgaccaaatttgtccgcacaagtactaataaggttaaatgcccagtatttgtagtgcggtggacacccgaaggaaggaggctcgtcacaggagcatcttccggtgaatttactctgtggaatggattgacatttaattttgaaacaatacttcaggcccatgactctccggtgagggccatgacctggtcccacaacgacatgtggatgctgaccgcagaccatggtgggtatgtaaaatactggcagtcaaacatgaataatgtgaagatgtttcaggcccataaagaagctatacgggaggcttctttttcaccaactgataataagttcgccacctgttcagacgatggtacggtccgcatttgggattttctccgatgtcatgaggagagaatactgaggggtcacggagccgatgtcaaatgtgtggactggcatccaaccaagggtcttgtcgtttcaggctccaaagattcccaacagccgattaagttttgggaccctaaaaccggacaatccctggcgacactgcatgcccataagaacacggtcatggaagtcaagctcaatcttaatgggaattggctgctcacggcttctcgggaccacctttgcaagctgttcgatattagaaatttgaaagaagaactgcaggtatttcgagggcataagaaggaagccactgcggtagcctggcacccagtccatgaaggtctgttcgcgagtggggggtctgatggttccctgctcttttggcacgtcggggtagagaaggaagttggtgggatggagatggcgcatgagggcatgatatggagcttggcctggcaccctctcggacatatactctgtagtggcagcaatgatcacacatctaagttttggacacggaacagaccaggcgataaaatgcgggatcgatacaaccttaatctgcttcccgggatgagcgaggacggagtagagtacgatgatctcgagccaaacagtctcgcagtgatacccggcatgggcatccctgagcaactcaaattggccatggagcaagagcagatgggcaaagatgagtctaacgaaatagaaatgaccattcctggccttgattgggggatggaggaagtaatgcagaaagaccagaagaaagtgccacagaaaaaggtcccatacgcgaaaccgattcccgcgcaattccagcaggcatggatgcaaaacaaggtgcctattcccgctccaaatgaagtcctgaacgatcgaaaagaggatattaaactggaggagaaaaaaaagacgcaagcagaaattgagcaggagatggccacgttgcagtacacgaacccacaactgctggagcaattgaaaatcgagcgacttgcgcagaaacaggttgagcagatc

SEQ ID NO: 313 - DNA, 678 bp, Artificial Sequence
  Chemically Synthesized
tctgtggtaccgcccaatcgctcgcagaccggctggccccggggggtcactcagttcggcaacaagtacatccagcagacgaagcccctcaccctggagcgcaccatcaacctgtaccctcttaccaattatacttttggtacaaaagagcccctctacgagaaggacagctctgttgcagccagatttcagcgcatgagggaagaatttgataaaattggaatgaggaggactgtagaaggggttctgattgtacatgagcaccggctaccccatgtgttactgctgcagctgggaacaactttcttcaaactacctggtggtgaacttaacccaggagaagatgaagttgaaggactaaaacgcttaatgacagagatactgggtcgtcaggatggagttttgcaagactgggtcattgacgattgcattggtaactggtggagaccaaattttgaacctcctcagtatccatatattcctgcacatattacaaagcctaaggaacataagaagttgtttctggttcagcttcaagaaaaagccttgtttgcagtccctaaaaattacaagctggtagctgcaccattgtttgaattgtatgacaatgcaccaggatatggacccatcatttctagtctccctcagctgttgagcaggttcaattttatttacaac

SEQ ID NO: 314 - DNA, 684 bp, Artificial Sequence
  Chemically Synthesized
gaagacatctggccgacaatcgagaggacgaccatcagtgcgtccgtaccggaggccccagccaatttcgacgaaaagccgccttttaatagaacgataaacgtctaccctctcacaaactacactttcggcacgaaagatgcccaagcagagaaagacaaatcagtcccggaaaggtttaagcgcatgaaagatgagtacgaagtcatgggaatgcgaagaagcgttgaagccgtccttatcgtacatgagcattccttgccgcatatcctgttgctgcagattgggactacattctataaactcccagggggagaattggagttgggcgaagatgagattagtggggtgacccgattgttgaacgaaaccctgggtaggacagatggagaaaccaatgaatggacgatcgaggatgaaattgggaactggtggcggcccaattttgacccacctcggtatccgtacattcctgcacacgtcacaaaacccaaggagcatacaaagctgctgctggtccagcttccctccaagtcaactttttgtgtaccaaaaaattttaagctggtggctgcgccactcttcgagctgtacgacaacgcggcggcttacggtcctctgatttcatcacttcctacgacgttgagtcggttcaactttatatttaacgacagtaactagtaa

SEQ ID NO: 315 - DNA, 714 bp, Artificial Sequence
  Chemically Synthesized
gcaagctcacaagttagtaacaaatctggcagtgggtggcctagacgagggtctcaaggccaggctgacgcagcatctagcaataataacgggacccaaaagtacacaaaccaggctctgaccattaaccgcacgatcaatttgtatccattgaccaattataccttcgggacgaaggagccgctttttgagaaagatccgagtgtgccatcaaggttccaaagaatgcgcgaagaatttgatcggataggcatgcggcggtcagtggagggtgtgctcctggtccacgaacacggcctgccccatgtcctgctgctccagcttgggactactttcttcaagttgcctggtggagaactgaacgccggtgaagatgaggtggaaggacttaaacgcctcttgtctgaaacccttggccgacaggatggcgttaaacaagagtggatagtagaggacaccatcggcaattggtggaggccaaacttcgaaccgccgcaatatccttatatacctccgcacatcacgaagcccaaggagcacaagagactgttcttggtccaactccatgaaaaggcattgttcgcggtcccaaagaactataagctcgttgcagcgcctctgttcgagttgtatgataactcccaggggtacggccccatcattagctccctgccgcaggcgctctgtcgctttaattttatttacatgtagtaa

SEQ ID NO: 316 - DNA, 597 bp, Artificial Sequence
  Chemically Synthesized
ctgaccctggagcgcaccatcaacctgtaccctcttaccaattatacttttggtacaaaagagcccctctacgagaaggacagctctgttgcagccagatttcagcgcatgagggaagaatttgataaaattggaatgaggaggactgtagaaggggttctgattgtacatgagcaccggctaccccatgtgttactgctgcagctgggaacaactttcttcaaactacctggtggtgaacttaacccaggagaagatgaagttgaaggactaaaacgcttaatgacagagatactgggtcgtcaggatggagttttgcaagactgggtcattgacgattgcattggtaactggtggagaccaaattttgaacctcctcagtatccatatattcctgcacatattacaaagcctaaggaacataagaagttgtttctggttcagcttcaagaaaaagccttgtttgcagtccctaaaaattacaagctggtagctgcaccattgtttgaattgtatgacaatgcaccaggatatggacccatcatttctagtctccctcagctgttgagcaggttcaattttatttacaactagtaa

SEQ ID NO: 317 - DNA, 684 bp, Artificial Sequence
  Chemically Synthesized
tctgtggtaccgcccaatcgctcgcagaccggctggcctagaggcgtcactcagttcggcaacaagtacatccagcagacgaagcccctcaccctggagcgcaccatcaacctgtaccctcttaccaattatacttttggtacaaaagagcccctctacgagaaggacagctctgttgcagccagctttcagcgcatgagggaagaatttgataaaattggaatgaggaggactgtagaaggggttctgattgtacatgagcaccggctaccccatgtgttactgctgcagctgggaacaactttcttcaaactacctggtggtgaacttaacccaggagaagatgaagttgaaggactaaaacgcttaatgacagagatactgggtcgtcaggatggagttttgcaagactgggtcattgacgattgcattggtaactggtggagaccaaattttgaacctcctcagtatccatatattcctgcacatattacaaagcctaaggaacataagaagttgtttctggttcagcttcaagaaaaagccttgtttgcagtccctaaaaattacaagctggtagctgcaccattgtttgaattgtatgacaatgcaccaggatatggacccatcatttctagtctccctcagctgttgagcaggttcaattttatttacaactagtaa

SEQ ID NO: 318 - DNA, 684 bp, Artificial Sequence
  Chemically Synthesized
tctgtggtaccgcccaatcgctcgcagaccggctggcctagaggcgtcactcagttcggcaacaagtacatccagcagacgaagcccctcaccctggagcgcaccatcaacctgtaccctcttaccaattatacttttggtacaaaagagcccctctacgagaaggacagctctgttgcagccagatttcagcgcatgagggaagaatttgataaaattggaatgaggaggactgtagaaggggttctgattgtacatgagcaccggctaccccatgtgttactgctgcagctgggaacaactgccttcaaactacctggtggtgaacttaacccaggagaagatgaagttgaaggactaaaacgcttaatgacagagatactgggtcgtcaggatggagttttgcaagactgggtcattgacgattgcattggtaactggtggagaccaaattttgaacctcctcagtatccatatattcctgcacatattacaaagcctaaggaacataagaagttgtttctggttcagcttcaagaaaaagccttgtttgcagtccctaaaaattacaagctggtagctgcaccattgtttgaattgtatgacaatgcaccaggatatggacccatcatttctagtctccctcagctgttgagcaggttcaattttatttacaactagtaa

SEQ ID NO: 319 - DNA, 1392 bp, Artificial Sequence
  Chemically Synthesized
tctgtagttcccccaaataggtcccaaacggggtggcctagaggcgtcacgcaattcgggaacaaatatatacaacagacaaaacctcttactctggagcggacgataaatttgtaccccctgacaaactacacgtttggtacgaaggaaccattgtacgagaaagattcttcagtcgctgctcggtttcaaaggatgcgagaagagttcgataagataggtatgcgacggaccgtagaaggggtcctcattgtgcacgaacatcgcctgcctcatgtgttgcttctccaactcggcacaacgttctttaaactgcctgggggcgaacttaaccctggggaagatgaggtggaggggctcaaaagattgatgaccgaaatcctgggcagacaggacggcgttctgcaggattgggttatagacgattgtataggtaactggtggcgaccgaacttcgaaccgccgcaatacccatatatccccgctcacataacaaagcccaaggagcacaagaaattgtttcttgtacagcttcaggaaaaagcactcttcgcagtgcccaagaactacaaacttgtagctgcgcccttgttcgagttgtatgataacgctcccggttatggcccgatcatatcatcccttccacaattgctcagtcgctttaatttcatttataatggaggtggaggctctggtggaggcggcagttcagtcgttccgcccaataggtcacagacgggttggccccgaggggtcacacaattcggcaacaaatacattcagcagaccaagccccttactttggaacggaccatcaatctgtatccgctcacgaattacacgttcggaaccaaagagccattgtacgagaaggattccagcgttgccgcgagattccagaggatgagagaagagttcgataagataggaatgcgcaggactgttgaaggggtactcatagtccatgaacacagactcccgcacgtccttctgctgcagttgggcacgacctttttcaagttgccaggtggggaattgaatccaggagaagacgaagtagaaggtctcaagcgcctcatgacagagattcttggacggcaggatggcgtacttcaagactgggtcatagacgactgtattggtaactggtggcggcccaactttgaaccgccgcagtacccctacatcccggcccacatcacaaaacctaaggaacataagaagttgtttctggttcagcttcaagaaaaagccttgtttgcagtccctaaaaattacaagctggtagctgcaccattgtttgaattgtatgacaatgcaccaggatatggacccatcatttctagtctccctcagctgttgagcaggttcaattttatttacaactagtaa

SEQ ID NO: 320 - DNA, 4242 bp, Artificial Sequence
  Chemically Synthesized
atggactacaaagaccatgacggtgattataaagatcatgacatcgattacaaggatgacgatgacaagggcggaaactcaaagaaaaggtcactggaggacaacgaaacggaaatcaaagtctccagagacacctggaacactaagaacatgcggtccctggaaccgccacgaagcaagaaacggatacatggaggcaacatccccgctctggtggaaaaccagaagaagtactttggcacctacagcgtgatggccatgctgaacgctcagaccgtgctggaccacatccagaaggtggccgatattgagggcgagcagaacgagaacaacgagaatctgtggtttcaccccgtgatgagccacctgtacaacgccaagaacggctacgacaagcagcccgagaaaaccatgttcatcatcgagcggctgcagagctacttcccattcctgaagatcatggccgagaaccagagagagtacagcaacggcaagtacaagcagaaccgcgtggaagtgaacagcaacgacatcttcgaggtgctgaagcgcgccttcggcgtgctgaagatgtacagggacctgaccaacgcatacaagacctacgaggaaaagctgaacgacggctgcgagttcctgaccagcacagagcaacctctgagcggcatgatcaacaactactacacagtggccctgcggaacatgaacgagagatacggctacaagacagaggacctggccttcatccaggacaagcggttcaagttcgtgaaggacgcctacggcaagaaaaagtcccaagtgaataccggattcttcctgagcctgcaggactacaacggcgacacacagaagaagctgcacctgagcggagtgggaatcgccctgctgatctgcctgttcctggacaagcagtacatcaacatctttctgagcaggctgcccatcttctccagctacaatgcccagagcgaggaacggcggatcatcatcagatccttcggcatcaacagcatcaagctgcccaaggaccggatccacagcgagaagtccaacaagagcgtggccatggatatgctcaacgaagtgaagcggtgccccgacgagctgttcacaacactgtctgccgagaagcagtcccggttcagaatcatcagcgacgaccacaatgaagtgctgatgaagcggagcagcgacagattcgtgcctctgctgctgcagtatatcgattacggcaagctgttcgaccacatcaggttccacgtgaacatgggcaagctgagatacctgctgaaggccgacaagacctgcatcgacggccagaccagagtcagagtgatcgagcagcccctgaacggcttcggcagactggaagaggccgagacaatgcggaagcaagagaacggcaccttcggcaacagcggcatccggatcagagacttcgagaacatgaagcgggacgacgccaatcctgccaactatccctacatcgtggacacctacacacactacatcctggaaaacaacaaggtcgagatgtttatcaacgacaaagaggacagcgccccactgctgcccgtgatcgaggatgatagatacgtggtcaagacaatccccagctgccggatgagcaccctggaaattccagccatggccttccacatgtttctgttcggcagcaagaaaaccgagaagctgatcgtggacgtgcacaaccggtacaagagactgttccaggccatgcagaaagaagaagtgaccgccgagaatatcgccagcttcggaatcgccgagagcgacctgcctcagaagatcctggatctgatcagcggcaatgcccacggcaaggatgtggacgccttcatcagactgaccgtggacgacatgctgaccgacaccgagcggagaatcaagagattcaaggacgaccggaagtccattcggagcgccgacaacaagatgggaaagagaggcttcaagcagatctccacaggcaagctggccgacttcctggccaaggacatcgtgctgtttcagcccagcgtgaacgatggcgagaacaagatcaccggcctgaactaccggatcatgcagagcgccattgccgtgtacgatagcggcgacgattacgaggccaagcagcagttcaagctgatgttcgagaaggcccggctgatcggcaagggcacaacagagcctcatccatttctgtacaaggtgttcgcccgcagcatccccgccaatgccgtcgagttctacgagcgctacctgatcgagcggaagttctacctgaccggcctgtccaacgagatcaagaaaggcaacagagtggatgtgcccttcatccggcgggaccagaacaagtggaaaacacccgccatgaagaccctgggcagaatctacagcgaggatctgcccgtggaactgcccagacagatgttcgacaatgagatcaagtcccacctgaagtccctgccacagatggaaggcatcgacttcaacaatgccaacgtgacctatctgatcgccgagtacatgaagagagtgctggacgacgacttccagaccttctaccagtggaaccgcaactaccggtacatggacatgcttaagggcgagtacgacagaaagggctccctgcagcactgcttcaccagcgtggaagagagagaaggcctctggaaagagcgggcctccagaacagagcggtacagaaagcaggccagcaacaagatccgcagcaaccggcagatgagaaacgccagcagcgaagagatcgagacaatcctggataagcggctgagcaacagccggaacgagtaccagaaaagcgagaaagtgatccggcgctacagagtgcaggatgccctgctgtttctgctggccaaaaagaccctgaccgaactggccgatttcgacggcgagaggttcaaactgaaagaaatcatgcccgacgccgagaagggaatcctgagcgagatcatgcccatgagcttcaccttcgagaaaggcggcaagaagtacaccatcaccagcgagggcatgaagctgaagaactacggcgacttctttgtgctggctagcgacaagaggatcggcaacctgctggaactcgtgggcagcgacatcgtgtccaaagaggatatcatggaagagttcaacaaatacgaccagtgcaggcccgagatcagctccatcgtgttcaacctggaaaagtgggccttcgacacataccccgagctgtctgccagagtggaccgggaagagaaggtggacttcaagagcatcctgaaaatcctgctgaacaacaagaacatcaacaaagagcagagcgacatcctgcggaagatccggaacgccttcgatgcaaacaattaccccgacaaaggcgtggtggaaatcaaggccctgcctgagatcgccatgagcatcaagaaggcctttggggagtacgccatcatgaagtcgcgaggcggtggaggtagtggagggggaggatcaacgcgtcaggaaatcatcgccagcgtggaccacatcaagtttgacttggagatcgcggtggagcagcagctgggggcgcagccgctgcccttccccggcatggacaagtcgggcgctgctgtctgtgaattctttttgaaagctgcctgcggcaaagggggcatgtgtccgtttcgccacatcagtggtgagaaaacagttgtgtgcaaacactggctgcgtggcctatgcaagaaaggggaccagtgtgagttcctgcatgagtatgacatgaccaagatgcccgagtgctacttctactccaagttcggggagtgcagcaacaaggaatgtcccttcctgcacatcgaccccgagtccaagatcaaggactgtccttggtatgaccgtggcttctgcaagcacggtcccctctgcaggcaccggcacacacggagagtcatctgtgtgaattacctcgtgggattctgcccggaggggccctcgtgtaaattcatgcaccctcgatttgaactgcccatgggaaccaccgagcagcccccactgccgcagcagacacagcctccagcaaagcagagaaccccgcaggtcatcggggtcatgcagagtcaaaacagcagcgcgggcaaccggggaccccggccactggagcaggtcacctgttacaagtgtggcgagaaaggacactacgccaacagatgcaccaaagggcacttggcctttctcagtggacagtagtaa

SEQ ID NO: 321 - DNA, 5214 bp, Artificial Sequence
  Chemically Synthesized
atggactacaaagaccatgacggtgattataaagatcatgacatcgattacaaggatgacgatgacaagggcggaaactcaaagaaaaggtcactggaggacaacgaaacggaaatcaaagtctccagagacacctggaacactaagaacatgcggtccctggaaccgccacgaagcaagaaacggatacatggaggcaacatccccgctctggtggaaaaccagaagaagtactttggcacctacagcgtgatggccatgctgaacgctcagaccgtgctggaccacatccagaaggtggccgatattgagggcgagcagaacgagaacaacgagaatctgtggtttcaccccgtgatgagccacctgtacaacgccaagaacggctacgacaagcagcccgagaaaaccatgttcatcatcgagcggctgcagagctacttcccattcctgaagatcatggccgagaaccagagagagtacagcaacggcaagtacaagcagaaccgcgtggaagtgaacagcaacgacatcttcgaggtgctgaagcgcgccttcggcgtgctgaagatgtacagggacctgaccaacgcatacaagacctacgaggaaaagctgaacgacggctgcgagttcctgaccagcacagagcaacctctgagcggcatgatcaacaactactacacagtggccctgcggaacatgaacgagagatacggctacaagacagaggacctggccttcatccaggacaagcggttcaagttcgtgaaggacgcctacggcaagaaaaagtcccaagtgaataccggattcttcctgagcctgcaggactacaacggcgacacacagaagaagctgcacctgagcggagtgggaatcgccctgctgatctgcctgttcctggacaagcagtacatcaacatctttctgagcaggctgcccatcttctccagctacaatgcccagagcgaggaacggcggatcatcatcagatccttcggcatcaacagcatcaagctgcccaaggaccggatccacagcgagaagtccaacaagagcgtggccatggatatgctcaacgaagtgaagcggtgccccgacgagctgttcacaacactgtctgccgagaagcagtcccggttcagaatcatcagcgacgaccacaatgaagtgctgatgaagcggagcagcgacagattcgtgcctctgctgctgcagtatatcgattacggcaagctgttcgaccacatcaggttccacgtgaacatgggcaagctgagatacctgctgaaggccgacaagacctgcatcgacggccagaccagagtcagagtgatcgagcagcccctgaacggcttcggcagactggaagaggccgagacaatgcggaagcaagagaacggcaccttcggcaacagcggcatccggatcagagacttcgagaacatgaagcgggacgacgccaatcctgccaactatccctacatcgtggacacctacacacactacatcctggaaaacaacaaggtcgagatgtttatcaacgacaaagaggacagcgccccactgctgcccgtgatcgaggatgatagatacgtggtcaagacaatccccagctgccggatgagcaccctggaaattccagccatggccttccacatgtttctgttcggcagcaagaaaaccgagaagctgatcgtggacgtgcacaaccggtacaagagactgttccaggccatgcagaaagaagaagtgaccgccgagaatatcgccagcttcggaatcgccgagagcgacctgcctcagaagatcctggatctgatcagcggcaatgcccacggcaaggatgtggacgccttcatcagactgaccgtggacgacatgctgaccgacaccgagcggagaatcaagagattcaaggacgaccggaagtccattcggagcgccgacaacaagatgggaaagagaggcttcaagcagatctccacaggcaagctggccgacttcctggccaaggacatcgtgctgtttcagcccagcgtgaacgatggcgagaacaagatcaccggcctgaactaccggatcatgcagagcgccattgccgtgtacgatagcggcgacgattacgaggccaagcagcagttcaagctgatgttcgagaaggcccggctgatcggcaagggcacaacagagcctcatccatttctgtacaaggtgttcgcccgcagcatccccgccaatgccgtcgagttctacgagcgctacctgatcgagcggaagttctacctgaccggcctgtccaacgagatcaagaaaggcaacagagtggatgtgcccttcatccggcgggaccagaacaagtggaaaacacccgccatgaagaccctgggcagaatctacagcgaggatctgcccgtggaactgcccagacagatgttcgacaatgagatcaagtcccacctgaagtccctgccacagatggaaggcatcgacttcaacaatgccaacgtgacctatctgatcgccgagtacatgaagagagtgctggacgacgacttccagaccttctaccagtggaaccgcaactaccggtacatggacatgcttaagggcgagtacgacagaaagggctccctgcagcactgcttcaccagcgtggaagagagagaaggcctctggaaagagcgggcctccagaacagagcggtacagaaagcaggccagcaacaagatccgcagcaaccggcagatgagaaacgccagcagcgaagagatcgagacaatcctggataagcggctgagcaacagccggaacgagtaccagaaaagcgagaaagtgatccggcgctacagagtgcaggatgccctgctgtttctgctggccaaaaagaccctgaccgaactggccgatttcgacggcgagaggttcaaactgaaagaaatcatgcccgacgccgagaagggaatcctgagcgagatcatgcccatgagcttcaccttcgagaaaggcggcaagaagtacaccatcaccagcgagggcatgaagctgaagaactacggcgacttctttgtgctggctagcgacaagaggatcggcaacctgctggaactcgtgggcagcgacatcgtgtccaaagaggatatcatggaagagttcaacaaatacgaccagtgcaggcccgagatcagctccatcgtgttcaacctggaaaagtgggccttcgacacataccccgagctgtctgccagagtggaccgggaagagaaggtggacttcaagagcatcctgaaaatcctgctgaacaacaagaacatcaacaaagagcagagcgacatcctgcggaagatccggaacgccttcgatgcaaacaattaccccgacaaaggcgtggtggaaatcaaggccctgcctgagatcgccatgagcatcaagaaggcctttggggagtacgccatcatgaagtcgcgaggcggtggaggtagtggagggggaggatcaacgcgtggctcaccccctcgattcttccacatgccgcgctttcaacaccaagcccccaggcaactcttttacaaacgcccagactttgcgcagcagcaggcgatgcagcagcttactttcgacggaaagcgcatgcgaaaagcggtcaaccgcaagacaatagattacaatcccagtgtcattaaatacctcgagaatcgcatatggcaaagagatcaacgagacatgagagccattcaaccggatgcaggttattacaatgatctggtccctccgatcggcatgttgaataatccaatgaacgctgtcacgaccaaatttgtccgcacaagtactaataaggttaaatgcccagtatttgtagtgcggtggacacccgaaggaaggaggctcgtcacaggagcatcttccggtgaatttactctgtggaatggattgacatttaattttgaaacaatacttcaggcccatgactctccggtgagggccatgacctggtcccacaacgacatgtggatgctgaccgcagaccatggtgggtatgtaaaatactggcagtcaaacatgaataatgtgaagatgtttcaggcccataaagaagctatacgggaggcttctttttcaccaactgataataagttcgccacctgttcagacgatggtacggtccgcatttgggattttctccgatgtcatgaggagagaatactgaggggtcacggagccgatgtcaaatgtgtggactggcatccaaccaagggtcttgtcgtttcaggctccaaagattcccaacagccgattaagttttgggaccctaaaaccggacaatccctggcgacactgcatgcccataagaacacggtcatggaagtcaagctcaatcttaatgggaattggctgctcacggcttctcgggaccacctttgcaagctgttcgatattagaaatttgaaagaagaactgcaggtatttcgagggcataagaaggaagccactgcggtagcctggcacccagtccatgaaggtctgttcgcgagtggggggtctgatggttccctgctcttttggcacgtcggggtagagaaggaagttggtgggatggagatggcgcatgagggcatgatatggagcttggcctggcaccctctcggacatatactctgtagtggcagcaatgatcacacatctaagttttggacacggaacagaccaggcgataaaatgcgggatcgatacaaccttaatctgcttcccgggatgagcgaggacggagtagagtacgatgatctcgagccaaacagtctcgcagtgatacccggcatgggcatccctgagcaactcaaattggccatggagcaagagcagatgggcaaagatgagtctaacgaaatagaaatgaccattcctggccttgattgggggatggaggaagtaatgcagaaagaccagaagaaagtgccacagaaaaaggtcccatacgcgaaaccgattcccgcgcaattccagcaggcatggatgcaaaacaaggtgcctattcccgctccaaatgaagtcctgaacgatcgaaaagaggatattaaactggaggagaaaaaaaagacgcaagcagaaattgagcaggagatggccacgttgcagtacacgaacccacaactgctggagcaattgaaaatcgagcgacttgcgcagaaacaggttgagcagatctagtaa

SEQ ID NO: 322 - DNA, 4191 bp, Artificial Sequence
  Chemically Synthesized
atggactacaaagaccatgacggtgattataaagatcatgacatcgattacaaggatgacgatgacaagggcggaaactcaaagaaaaggtcactggaggacaacgaaacggaaatcaaagtctccagagacacctggaacactaagaacatgcggtccctggaaccgccacgaagcaagaaacggatacatggaggcaacatccccgctctggtggaaaaccagaagaagtactttggcacctacagcgtgatggccatgctgaacgctcagaccgtgctggaccacatccagaaggtggccgatattgagggcgagcagaacgagaacaacgagaatctgtggtttcaccccgtgatgagccacctgtacaacgccaagaacggctacgacaagcagcccgagaaaaccatgttcatcatcgagcggctgcagagctacttcccattcctgaagatcatggccgagaaccagagagagtacagcaacggcaagtacaagcagaaccgcgtggaagtgaacagcaacgacatcttcgaggtgctgaagcgcgccttcggcgtgctgaagatgtacagggacctgaccaacgcatacaagacctacgaggaaaagctgaacgacggctgcgagttcctgaccagcacagagcaacctctgagcggcatgatcaacaactactacacagtggccctgcggaacatgaacgagagatacggctacaagacagaggacctggccttcatccaggacaagcggttcaagttcgtgaaggacgcctacggcaagaaaaagtcccaagtgaataccggattcttcctgagcctgcaggactacaacggcgacacacagaagaagctgcacctgagcggagtgggaatcgccctgctgatctgcctgttcctggacaagcagtacatcaacatctttctgagcaggctgcccatcttctccagctacaatgcccagagcgaggaacggcggatcatcatcagatccttcggcatcaacagcatcaagctgcccaaggaccggatccacagcgagaagtccaacaagagcgtggccatggatatgctcaacgaagtgaagcggtgccccgacgagctgttcacaacactgtctgccgagaagcagtcccggttcagaatcatcagcgacgaccacaatgaagtgctgatgaagcggagcagcgacagattcgtgcctctgctgctgcagtatatcgattacggcaagctgttcgaccacatcaggttccacgtgaacatgggcaagctgagatacctgctgaaggccgacaagacctgcatcgacggccagaccagagtcagagtgatcgagcagcccctgaacggcttcggcagactggaagaggccgagacaatgcggaagcaagagaacggcaccttcggcaacagcggcatccggatcagagacttcgagaacatgaagcgggacgacgccaatcctgccaactatccctacatcgtggacacctacacacactacatcctggaaaacaacaaggtcgagatgtttatcaacgacaaagaggacagcgccccactgctgcccgtgatcgaggatgatagatacgtggtcaagacaatccccagctgccggatgagcaccctggaaattccagccatggccttccacatgtttctgttcggcagcaagaaaaccgagaagctgatcgtggacgtgcacaaccggtacaagagactgttccaggccatgcagaaagaagaagtgaccgccgagaatatcgccagcttcggaatcgccgagagcgacctgcctcagaagatcctggatctgatcagcggcaatgcccacggcaaggatgtggacgccttcatcagactgaccgtggacgacatgctgaccgacaccgagcggagaatcaagagattcaaggacgaccggaagtccattcggagcgccgacaacaagatgggaaagagaggcttcaagcagatctccacaggcaagctggccgacttcctggccaaggacatcgtgctgtttcagcccagcgtgaacgatggcgagaacaagatcaccggcctgaactaccggatcatgcagagcgccattgccgtgtacgatagcggcgacgattacgaggccaagcagcagttcaagctgatgttcgagaaggcccggctgatcggcaagggcacaacagagcctcatccatttctgtacaaggtgttcgcccgcagcatccccgccaatgccgtcgagttctacgagcgctacctgatcgagcggaagttctacctgaccggcctgtccaacgagatcaagaaaggcaacagagtggatgtgcccttcatccggcgggaccagaacaagtggaaaacacccgccatgaagaccctgggcagaatctacagcgaggatctgcccgtggaactgcccagacagatgttcgacaatgagatcaagtcccacctgaagtccctgccacagatggaaggcatcgacttcaacaatgccaacgtgacctatctgatcgccgagtacatgaagagagtgctggacgacgacttccagaccttctaccagtggaaccgcaactaccggtacatggacatgcttaagggcgagtacgacagaaagggctccctgcagcactgcttcaccagcgtggaagagagagaaggcctctggaaagagcgggcctccagaacagagcggtacagaaagcaggccagcaacaagatccgcagcaaccggcagatgagaaacgccagcagcgaagagatcgagacaatcctggataagcggctgagcaacagccggaacgagtaccagaaaagcgagaaagtgatccggcgctacagagtgcaggatgccctgctgtttctgctggccaaaaagaccctgaccgaactggccgatttcgacggcgagaggttcaaactgaaagaaatcatgcccgacgccgagaagggaatcctgagcgagatcatgcccatgagcttcaccttcgagaaaggcggcaagaagtacaccatcaccagcgagggcatgaagctgaagaactacggcgacttctttgtgctggctagcgacaagaggatcggcaacctgctggaactcgtgggcagcgacatcgtgtccaaagaggatatcatggaagagttcaacaaatacgaccagtgcaggcccgagatcagctccatcgtgttcaacctggaaaagtgggccttcgacacataccccgagctgtctgccagagtggaccgggaagagaaggtggacttcaagagcatcctgaaaatcctgctgaacaacaagaacatcaacaaagagcagagcgacatcctgcggaagatccggaacgccttcgatgcaaacaattaccccgacaaaggcgtggtggaaatcaaggccctgcctgagatcgccatgagcatcaagaaggcctttggggagtacgccatcatgaagtcgcgaggcggtggaggtagtggagggggaggatcaacgcgttctgtggtaccgcccaatcgctcgcagaccggctggccccggggggtcactcagttcggcaacaagtacatccagcagacgaagcccctcaccctggagcgcaccatcaacctgtaccctcttaccaattatacttttggtacaaaagagcccctctacgagaaggacagctctgttgcagccagatttcagcgcatgagggaagaatttgataaaattggaatgaggaggactgtagaaggggttctgattgtacatgagcaccggctaccccatgtgttactgctgcagctgggaacaactttcttcaaactacctggtggtgaacttaacccaggagaagatgaagttgaaggactaaaacgcttaatgacagagatactgggtcgtcaggatggagttttgcaagactgggtcattgacgattgcattggtaactggtggagaccaaattttgaacctcctcagtatccatatattcctgcacatattacaaagcctaaggaacataagaagttgtttctggttcagcttcaagaaaaagccttgtttgcagtccctaaaaattacaagctggtagctgcaccattgtttgaattgtatgacaatgcaccaggatatggacccatcatttctagtctccctcagctgttgagcaggttcaattttatttacaactagtaa

SEQ ID NO: 323 - protein, 34 aa, Artificial Sequence
  Chemically Synthesized
KKRNSNEYRLVPTKWQDYKKPGPNQKYTSDGKKR

SEQ ID NO: 324 - protein, 36 aa, Artificial Sequence
  Chemically Synthesized
KKRLHLIIADAELETVPPEILDHPAIVNYAKRRKKR

SEQ ID NO: 325 - protein, 29 aa, Artificial Sequence
  Chemically Synthesized
KKRIEELEIELGLRAPPKKEKKGKKSKKR

SEQ ID NO: 326 - protein, 26 aa, Artificial Sequence
  Chemically Synthesized
KKRALKYRLNPKLLKENNKKDVNKKR

SEQ ID NO: 327 - protein, 26 aa, Artificial Sequence
  Chemically Synthesized
KKRNFLESIEISINLKDVDLSDPKKR

SEQ ID NO: 328 - protein, 30 aa, Artificial Sequence
  Chemically Synthesized
KKRSEKSMALRLAGELSEAAEGRGGAMKKR

SEQ ID NO: 329 - protein, 30 aa, Artificial Sequence
  Chemically Synthesized
KKRFKLTGTGKIKRKHAFKSHILTKKSKKR

SEQ ID NO: 330 - protein, 30 aa, Artificial Sequence
  Chemically Synthesized
KKRNEHTMEERLAGELADAVNGRGTAVKKR

SEQ ID NO: 331 - protein, 30 aa, Artificial Sequence; identical to SEQ ID NO: 328
  Chemically Synthesized

SEQ ID NO: 332 - protein, 30 aa, Artificial Sequence
  Chemically Synthesized
KKRGEKSMSLRLANELMEATEGRGGAMKKR

SEQ ID NO: 333 - protein, 46 aa, Artificial Sequence
  Chemically Synthesized
KKRLATHNAGKGAKYTRYRLPVSLLYYEVFDSKEAAMSAEALFKKR

SEQ ID NO: 334 - protein, 30 aa, Artificial Sequence; identical to SEQ ID NO: 328
  Chemically Synthesized

SEQ ID NO: 335 - protein, 30 aa, Artificial Sequence; identical to SEQ ID NO: 328
  Chemically Synthesized

SEQ ID NO: 336 - protein, 30 aa, Artificial Sequence; identical to SEQ ID NO: 328
  Chemically Synthesized

SEQ ID NO: 337 - protein, 30 aa, Artificial Sequence; identical to SEQ ID NO: 328
  Chemically Synthesized

SEQ ID NO: 338 - protein, 30 aa, Artificial Sequence; identical to SEQ ID NO: 328
  Chemically Synthesized

SEQ ID NO: 339 - protein, 30 aa, Artificial Sequence
  Chemically Synthesized
KKRGEKSMAQRLANELLEAAEGRGGAMKKR

SEQ ID NO: 340 - protein, 30 aa, Artificial Sequence
  Chemically Synthesized
KKRFKVTGSGKIKRKHAFKSHILTKKSKKR

SEQ ID NO: 341 - protein, 44 aa, Artificial Sequence
  Chemically Synthesized
KKRKKYLKAAKGYRGALSRRYKLAKQMYVRSKWYSYVGRKLKKR

SEQ ID NO: 342 - protein, 30 aa, Artificial Sequence; identical to SEQ ID NO: 340
  Chemically Synthesized

SEQ ID NO: 343 - protein, 44 aa, Artificial Sequence
  Chemically Synthesized
KKRKKIMKAVKGYRGALSRRYRLAKQAYIKAKKHAYVGRKLKKR

SEQ ID NO: 344 - protein, 32 aa, Artificial Sequence
  Chemically Synthesized
KKRGYQTHGIRPRLAKKKTVMSKIARKQGKKR

SEQ ID NO: 345 - protein, 45 aa, Artificial Sequence
  Chemically Synthesized
KKRREKFLKSAKGYRGAIKRRYRLAKQHYYRAKWYAYAGRKLKKR

SEQ ID NO: 346 - protein, 37 aa, Artificial Sequence
  Chemically Synthesized
KKRIGLIFGGYSNEHEVSISSAKTVFQAFNSEINKKR

SEQ ID NO: 347 - protein, 30 aa, Artificial Sequence; identical to SEQ ID NO: 328
  Chemically Synthesized

SEQ ID NO: 348 - protein, 30 aa, Artificial Sequence
  Chemically Synthesized
KKRGEKSMDLRLAGELIDASEGRGAAMKKR

SEQ ID NO: 349 - protein, 46 aa, Artificial Sequence
  Chemically Synthesized
KKRFSFHALHLRLSPRLLKSEKAQRHTKEYTARLYRAFMRSVEKKR

SEQ ID NO: 350 - protein, 30 aa, Artificial Sequence
  Chemically Synthesized
KKRNEKTMEERLAKEILDASQGTGAAVKKR

SEQ ID NO: 351 - protein, 46 aa, Artificial Sequence
  Chemically Synthesized
KKRAMELGIDVITPKNINDEEVFDLLDKLNPDFIVVVAYGQLIKKR

SEQ ID NO: 352 - protein, 30 aa, Artificial Sequence; identical to SEQ ID NO: 328
  Chemically Synthesized

SEQ ID NO: 353 - protein, 44 aa, Artificial Sequence
  Chemically Synthesized
KKRKKYLKAAKGYRGALSRRYKLAKQMYVRSKWYSYVGRKQKKR

SEQ ID NO: 354 - protein, 42 aa, Artificial Sequence
  Chemically Synthesized
KKRRAILEAASGYRGQRSRLYRKAKEQVTHSLVYNYNDRKKR

SEQ ID NO: 355 - protein, 30 aa, Artificial Sequence; identical to SEQ ID NO: 339
  Chemically Synthesized

SEQ ID NO: 356 - protein, 30 aa, Artificial Sequence; identical to SEQ ID NO: 328
  Chemically Synthesized

SEQ ID NO: 357 - protein, 30 aa, Artificial Sequence; identical to SEQ ID NO: 328
  Chemically Synthesized

SEQ ID NO: 358 - protein, 30 aa, Artificial Sequence; identical to SEQ ID NO: 328
  Chemically Synthesized

SEQ ID NO: 359 - protein, 30 aa, Artificial Sequence
  Chemically Synthesized
KKRSEKSMALRLAGELLEASEGRGGAMKKR

SEQ ID NO: 360 - protein, 29 aa, Artificial Sequence
  Chemically Synthesized
KKRMKSIGTVEVPQEAFLAILKTDTSKKR

SEQ ID NO: 361 - protein, 30 aa, Artificial Sequence
  Chemically Synthesized
KKRSEKSMALRLAGELLEAAEGRGGAMKKR

SEQ ID NO: 362 - protein, 30 aa, Artificial Sequence; identical to SEQ ID NO: 328
  Chemically Synthesized

SEQ ID NO: 363 - protein, 42 aa, Artificial Sequence
  Chemically Synthesized
KKRILNKAKGYWGSRGTILTVAKHAVDKAEQYAYRDRRVKKR

SEQ ID NO: 364 - protein, 44 aa, Artificial Sequence
  Chemically Synthesized
KKRRKILKAVKGYHGALSRRYRLAKQAYIKAKKHAYVGRKLKKR

SEQ ID NO: 365 - protein, 26 aa, Artificial Sequence
  Chemically Synthesized
KKRGIGVKVNNGILWLLELQPEGKKR

SEQ ID NO: 366 - protein, 44 aa, Artificial Sequence
  Chemically Synthesized
KKRKKFLKEAKGYRGALSRRYKLAKQMYIRSKWYSYVGRKIKKR

SEQ ID NO: 367 - protein, 32 aa, Artificial Sequence
  Chemically Synthesized
KKRFSVTGSGKVRRLKAYKSHILTKMSGKKKR

SEQ ID NO: 368 - protein, 43 aa, Artificial Sequence
  Chemically Synthesized
KKRKYLKAAKGYRGALSRRYRLAKQYYIRSGVYAYVGRKQKKR

SEQ ID NO: 369 - protein, 42 aa, Artificial Sequence
  Chemically Synthesized
KKRRAILEQASGYRGQRSRLYRKAKEQVTHSLVYNYNDRKKR

SEQ ID NO: 370 - protein, 46 aa, Artificial Sequence; identical to SEQ ID NO: 333
  Chemically Synthesized

SEQ ID NO: 371 - protein, 46 aa, Artificial Sequence; identical to SEQ ID NO: 333
  Chemically Synthesized

SEQ ID NO: 372 - protein, 27 aa, Artificial Sequence
  Chemically Synthesized
KKRIPNTVFIFLVPPEKKALYDRLKKR

SEQ ID NO: 373 - protein, 46 aa, Artificial Sequence; identical to SEQ ID NO: 333
  Chemically Synthesized

SEQ ID NO: 374 - protein, 40 aa, Artificial Sequence
  Chemically Synthesized
KKRILDTLFTRSPKNQQDFIEHTDDKKSIVNFFVGAFKKR

SEQ ID NO: 375 - protein, 26 aa, Artificial Sequence
  Chemically Synthesized
KKRELQELNQIRRNLEQSNASLLKKR

SEQ ID NO: 376 - protein, 37 aa, Artificial Sequence
  Chemically Synthesized
KKRNHMAWVWGIVGLIQAPMPLICYYFFVIRPDRKKR

SEQ ID NO: 377 - protein, 40 aa, Artificial Sequence
  Chemically Synthesized
KKRLFEEQQEAKKIDYANSRIKAIKLIGAIIFFMKSSKKR

SEQ ID NO: 378 - protein, 28 aa, Artificial Sequence
  Chemically Synthesized
KKRKKIPGLAMIVIGNNPASLIYVNKKR

SEQ ID NO: 379 - protein, 27 aa, Artificial Sequence
  Chemically Synthesized
KKRPELLIAFGGCMAQLPEVRQKLKKR

SEQ ID NO: 380 - protein, 30 aa, Artificial Sequence; identical to SEQ ID NO: 328
  Chemically Synthesized

SEQ ID NO: 381 - protein, 30 aa, Artificial Sequence; identical to SEQ ID NO: 359
  Chemically Synthesized

SEQ ID NO: 382 - protein, 32 aa, Artificial Sequence
  Chemically Synthesized
KKRGYQKYGVRPRLAKKKTVMCKIARKQGKKR

SEQ ID NO: 383 - protein, 31 aa, Artificial Sequence
  Chemically Synthesized
KKRSSHSKKQRGNKSRGFDQKSQRVSKGKKR

SEQ ID NO: 384 - protein, 32 aa, Artificial Sequence; identical to SEQ ID NO: 382
  Chemically Synthesized

SEQ ID NO: 385 - protein, 31 aa, Artificial Sequence
  Chemically Synthesized
KKRSSHSKKQRGNKSRGFDQKSQRSSKGKKR

SEQ ID NO: 386 - protein, 30 aa, Artificial Sequence; identical to SEQ ID NO: 332
  Chemically Synthesized

SEQ ID NO: 387 - protein, 30 aa, Artificial Sequence; identical to SEQ ID NO: 328
  Chemically Synthesized

SEQ ID NO: 388 - protein, 44 aa, Artificial Sequence
  Chemically Synthesized
KKRRKLLKEARGYRGTKHTSYKRAKEQVWKSGVYAYVGRKQKKR

SEQ ID NO: 389 - protein, 30 aa, Artificial Sequence; identical to SEQ ID NO: 328
  Chemically Synthesized

SEQ ID NO: 390 - protein, 46 aa, Artificial Sequence; identical to SEQ ID NO: 333
  Chemically Synthesized

SEQ ID NO: 391 - protein, 46 aa, Artificial Sequence; identical to SEQ ID NO: 333
  Chemically Synthesized

SEQ ID NO: 392 - protein, 46 aa, Artificial Sequence; identical to SEQ ID NO: 333
  Chemically Synthesized

SEQ ID NO: 393 - protein, 46 aa, Artificial Sequence; identical to SEQ ID NO: 333
  Chemically Synthesized

SEQ ID NO: 394 - protein, 30 aa, Artificial Sequence; identical to SEQ ID NO: 361
  Chemically Synthesized

SEQ ID NO: 395 - protein, 30 aa, Artificial Sequence; identical to SEQ ID NO: 348
  Chemically Synthesized

SEQ ID NO: 396 - protein, 27 aa, Artificial Sequence
  Chemically Synthesized
KKRMPNTVFIFLVPPKKKDLYDRLKKR

SEQ ID NO: 397 - protein, 30 aa, Artificial Sequence; identical to SEQ ID NO: 328
  Chemically Synthesized

SEQ ID NO: 398 - protein, 30 aa, Artificial Sequence; identical to SEQ ID NO: 328
  Chemically Synthesized

SEQ ID NO: 399 - protein, 30 aa, Artificial Sequence; identical to SEQ ID NO: 328
  Chemically Synthesized

SEQ ID NO: 400 - protein, 45 aa, Artificial Sequence
  Chemically Synthesized
KKRKGMSNKKVLTGVVVATKCDKTIKVMVSRMVRHKTYKKIVKKR

SEQ ID NO: 401 - protein, 30 aa, Artificial Sequence; identical to SEQ ID NO: 359
  Chemically Synthesized

SEQ ID NO: 402 - protein, 46 aa, Artificial Sequence; identical to SEQ ID NO: 333
  Chemically Synthesized

SEQ ID NO: 403 - protein, 40 aa, Artificial Sequence
  Chemically Synthesized
KKRILDTFFKRNNSNHKDFVEHEEKRKSLLKIAINAFKKR

SEQ ID NO: 404 - protein, 44 aa, Artificial Sequence
  Chemically Synthesized
KKRDNTRLIHYEGTTRRGESYYVDVFSLMYPKMDILLEYASKKR

SEQ ID NO: 405 - protein, 30 aa, Artificial Sequence
  Chemically Synthesized
KKRFALTGTGKIKRKHAFHSHILTKKSKKR

SEQ ID NO: 406 - protein, 41 aa, Artificial Sequence
  Chemically Synthesized
KKRATVRIQGQTYKVVSSEEPAHVKEVASYMNKKMEELKKR

SEQ ID NO: 407 - protein, 46 aa, Artificial Sequence; identical to SEQ ID NO: 333
  Chemically Synthesized

SEQ ID NO: 408 - protein, 30 aa, Artificial Sequence; identical to SEQ ID NO: 328
  Chemically Synthesized

SEQ ID NO: 409 - protein, 30 aa, Artificial Sequence; identical to SEQ ID NO: 328
  Chemically Synthesized

SEQ ID NO: 410 - protein, 30 aa, Artificial Sequence; identical to SEQ ID NO: 405
  Chemically Synthesized

SEQ ID NO: 411 - protein, 30 aa, Artificial Sequence
  Chemically Synthesized
KKREFETQGRKPHWRFLLPNFENDPLQKKR

SEQ ID NO: 412 - protein, 46 aa, Artificial Sequence
  Chemically Synthesized
KKRKIIALCGIDTRALTVLIREKGALNGIIAHDPNGNFDINTLKKR

SEQ ID NO: 413 - protein, 36 aa, Artificial Sequence
  Chemically Synthesized
KKRSRGVGSEGPAVFREKSTTQVDVEARKSQKDKKR

SEQ ID NO: 414 - protein, 42 aa, Artificial Sequence
  Chemically Synthesized
KKRLFKLAKGFVGDRKNHLRLTSGAVMRAMAYNYAHRKQKKR

SEQ ID NO: 415 - protein, 36 aa, Artificial Sequence
  Chemically Synthesized
KKRFERKKEASPADTPPESDSTTENASVEKKAEKKR

SEQ ID NO: 416 - protein, 27 aa, Artificial Sequence
  Chemically Synthesized
KKRLDKEGVMKSVKAHRFYSKPSIKKR

SEQ ID NO: 417 - protein, 45 aa, Artificial Sequence
  Chemically Synthesized
KKRPEQGRIAALYSDIVILADEDPRGEDSVELLEMIAAGCPEKKR

SEQ ID NO: 418 - protein, 36 aa, Artificial Sequence
  Chemically Synthesized
KKRSLPNLRTVRVKLEDGTTVKLRVAASTLRTMKKR

SEQ ID NO: 419 - protein, 30 aa, Artificial Sequence
  Chemically Synthesized
KKRFRLSAKGKAMHRQSGTSHLAKGLSKKR

SEQ ID NO: 420 - protein, 30 aa, Artificial Sequence; identical to SEQ ID NO: 348
  Chemically Synthesized

SEQ ID NO: 421 - protein, 30 aa, Artificial Sequence; identical to SEQ ID NO: 348
  Chemically Synthesized

SEQ ID NO: 422 - protein, 30 aa, Artificial Sequence; identical to SEQ ID NO: 348
  Chemically Synthesized

SEQ ID NO: 423 - protein, 42 aa, Artificial Sequence; identical to SEQ ID NO: 354
  Chemically Synthesized

SEQ ID NO: 424 - protein, 42 aa, Artificial Sequence
  Chemically Synthesized
KKRIQYNERLEFLGDSVLQLVITEYLFMNYKDKSEGELSKKR

SEQ ID NO: 425 - protein, 30 aa, Artificial Sequence
  Chemically Synthesized
KKRFTLTGTGKIKRKHAFHSHILTKKSKKR

SEQ ID NO: 426 - protein, 43 aa, Artificial Sequence
  Chemically Synthesized
KKRDLENCSYQASGISVVSHPKNPYVPTSHLNIRFFLAKNKKR

SEQ ID NO: 427 - protein, 26 aa, Artificial Sequence
  Chemically Synthesized
KKRRDFLKNNHVSFLISIHADSSKKR

SEQ ID NO: 428 - protein, 46 aa, Artificial Sequence; identical to SEQ ID NO: 333
  Chemically Synthesized

SEQ ID NO: 429 - protein, 32 aa, Artificial Sequence; identical to SEQ ID NO: 382
  Chemically Synthesized

SEQ ID NO: 430 - protein, 31 aa, Artificial Sequence
  Chemically Synthesized
KKRSSHSKKQRGNKSRGFDQKSQRGSKGKKR

SEQ ID NO: 431 - protein, 30 aa, Artificial Sequence; identical to SEQ ID NO: 359
  Chemically Synthesized

SEQ ID NO: 432 - protein, 30 aa, Artificial Sequence
  Chemically Synthesized
KKREIFTSIFEDKIDLKLFSFLIILIEKKR

SEQ ID NO: 433 - protein, 31 aa, Artificial Sequence
  Chemically Synthesized
KKRARRPGVPTRGDKKRAPRLGVPARGDKKR

SEQ ID NO: 434 - protein, 31 aa, Artificial Sequence
  Chemically Synthesized
KKRAPRLGVPARGDKKRARRPGVPAREDKKR

SEQ ID NO: 435 - protein, 31 aa, Artificial Sequence
  Chemically Synthesized
KKRARRPGVPAREDKKRAPRPGVPTRGDKKR

SEQ ID NO: 436 - protein, 31 aa, Artificial Sequence
  Chemically Synthesized
KKRAPRPGVPTRGDKKRAPRLGVPARGDKKR

SEQ ID NO: 437 - protein, 45 aa, Artificial Sequence
  Chemically Synthesized
KKRARRPGVPTRGDKKRAPRLGVPARGDKKRARRPGVPAREDKKR

SEQ ID NO: 438 - protein, 45 aa, Artificial Sequence
  Chemically Synthesized
KKRAPRLGVPARGDKKRARRPGVPAREDKKRAPRPGVPTRGDKKR

SEQ ID NO: 439 - protein, 45 aa, Artificial Sequence
  Chemically Synthesized
KKRARRPGVPAREDKKRAPRPGVPTRGDKKRAPRLGVPARGDKKR

SEQ ID NO: 440 - protein, 44 aa, Artificial Sequence; identical to SEQ ID NO: 353
  Chemically Synthesized

SEQ ID NO: 441 - protein, 45 aa, Artificial Sequence
  Chemically Synthesized
KKRTSVPDDDFVFTLSDDENDVLENGADEGDEQADEETASGSKKR

SEQ ID NO: 442 - protein, 38 aa, Artificial Sequence
  Chemically Synthesized
KKRAAAKDDDFVLTLSDDENDVLENGVEEDTLSSSKKR

SEQ ID NO: 443 - protein, 42 aa, Artificial Sequence
  Chemically Synthesized
KKRLQKQAKEEERARREAEKAAEEAAAKAEQEKKLEEQRKKR

SEQ ID NO: 444 - protein, 45 aa, Artificial Sequence
  Chemically Synthesized
KKRANADDDFVLTLSDDENDTLNQLEEEGEGDDGALATGSKTKKR

SEQ ID NO: 445 - protein, 44 aa, Artificial Sequence
  Chemically Synthesized
KKRAQETKIDSKESVKESPKQENSILKRLASSIKKQELPFTKKR

SEQ ID NO: 446 - protein, 46 aa, Artificial Sequence
  Chemically Synthesized
KKRSAEEEEKDLKKIMMTNKQRKLYNKMQYGINKKETRQDELAKKR

SEQ ID NO: 447 - protein, 35 aa, Artificial Sequence
  Chemically Synthesized
KKRKAHEERKEEKRSYKKTKSDRSAPKTKAKSKKR

SEQ ID NO: 448 - protein, 41 aa, Artificial Sequence
  Chemically Synthesized
KKRTIDKVDDSVEDGAEKKPEAAVKNDGETAEKPEKKHKKR

SEQ ID NO: 449 - protein, 39 aa, Artificial Sequence
  Chemically Synthesized
KKRKANEERKEEGKERSYKKTKADRTKLKTKAKSSSKKR

SEQ ID NO: 450 - protein, 26 aa, Artificial Sequence
  Chemically Synthesized
KKRAAQKKKEEEELERQKMMMSRKKR

SEQ ID NO: 451 - protein, 38 aa, Artificial Sequence
  Chemically Synthesized
KKRKREIERLEKMTDEEKKEEQAKEKELQDLIEQVKKR

SEQ ID NO: 452 - protein, 26 aa, Artificial Sequence
  Chemically Synthesized
KKRGHNSIIGHEKTNALETLKKKKKR

SEQ ID NO: 453 - protein, 43 aa, Artificial Sequence
  Chemically Synthesized
KKRSAKIKKATFDANKKKEVGVSDLTLLSKISDESINENLKKR

SEQ ID NO: 454 - protein, 37 aa, Artificial Sequence
  Chemically Synthesized
KKRKAREILDKHRKEEKELVKEGKTPYYLKKAEQKKR

SEQ ID NO: 455 - protein, 39 aa, Artificial Sequence
  Chemically Synthesized
KKRTHDELEQDGKEEEEKKEGEKPSSQNRAERDEPEKKR

SEQ ID NO: 456 - protein, 35 aa, Artificial Sequence
  Chemically Synthesized
KKRSLEDNETEIKVSRDTWNTKNMRSLEPPRSKKR

SEQ ID NO: 457 - protein, 35 aa, Artificial Sequence; identical to SEQ ID NO: 456
  Chemically Synthesized

SEQ ID NO: 458 - protein, 45 aa, Artificial Sequence
  Chemically Synthesized
KKRLPQAKRACAKCQKDNKKCDDARPCQRCIKAKTDCIDLPRKKR

SEQ ID NO: 459 - protein, 26 aa, Artificial Sequence
  Chemically Synthesized
KKRNSEEANDENDETNLKIPIPEKKR

SEQ ID NO: 460 - protein, 37 aa, Artificial Sequence
  Chemically Synthesized
KKRKVNELSQDVISLHSPKESNARKTKKNKNKKKKKR

SEQ ID NO: 461 - protein, 34 aa, Artificial Sequence
  Chemically Synthesized
KKRKSKSKQESSDSGVSEDDEIPLSDARNKTKKR

SEQ ID NO: 462 - protein, 45 aa, Artificial Sequence
  Chemically Synthesized
KKRKLKDTVSNCEFTEEDSESSFLLETIQPTKSTLRRSISPLKKR

SEQ ID NO: 463 - protein, 35 aa, Artificial Sequence
  Chemically Synthesized
KKRAEKKEQQKEKKKEKEKERMKAFIPPEESSKKR

SEQ ID NO: 464 - protein, 35 aa, Artificial Sequence
  Chemically Synthesized
KKRSANELAIDDQDTKESTDLAGTEDSAPKANKKR

SEQ ID NO: 465 - protein, 44 aa, Artificial Sequence
  Chemically Synthesized
KKRLTYSELFHKTQELNEELQSCLQKILEASADRNESKQDAKKR

SEQ ID NO: 466 - protein, 31 aa, Artificial Sequence
  Chemically Synthesized
KKRTKIQCSHFDLLVKLGQGGYGSVWLAKKR

SEQ ID NO: 467 - protein, 35 aa, Artificial Sequence
  Chemically Synthesized
KKRKSKLVEMTPKGLKKRKRVQIQEGSVSTNTKKR

SEQ ID NO: 468 - protein, 42 aa, Artificial Sequence
  Chemically Synthesized
KKRNVEEQNLIEQSITESQRIFSEKQRLEQERFNRELLEKKR

SEQ ID NO: 469 - protein, 35 aa, Artificial Sequence; identical to SEQ ID NO: 456
  Chemically Synthesized

SEQ ID NO: 470 - protein, 35 aa, Artificial Sequence; identical to SEQ ID NO: 456
  Chemically Synthesized

SEQ ID NO: 471 - protein, 35 aa, Artificial Sequence; identical to SEQ ID NO: 456
  Chemically Synthesized

SEQ ID NO: 472 - protein, 35 aa, Artificial Sequence; identical to SEQ ID NO: 456
  Chemically Synthesized

SEQ ID NO: 473 - protein, 35 aa, Artificial Sequence; identical to SEQ ID NO: 456
  Chemically Synthesized

SEQ ID NO: 474 - protein, 35 aa, Artificial Sequence; identical to SEQ ID NO: 456
  Chemically Synthesized

SEQ ID NO: 475 - protein, 35 aa, Artificial Sequence; identical to SEQ ID NO: 456
  Chemically Synthesized

SEQ ID NO: 476 - protein, 35 aa, Artificial Sequence; identical to SEQ ID NO: 456
  Chemically Synthesized

SEQ ID NO: 477 - protein, 35 aa, Artificial Sequence
  Chemically Synthesized
KKRSLEDNETEIEVSRDTWNNKNMRSLEPPRSKKR

SEQ ID NO: 478 - protein, 35 aa, Artificial Sequence; identical to SEQ ID NO: 477
  Chemically Synthesized

SEQ ID NO: 479 - protein, 40 aa, Artificial Sequence
  Chemically Synthesized
KKRVEKLDWMYAAPSTEGGALGGARIGERDMEEYLLGKKR

SEQ ID NO: 480 - protein, 40 aa, Artificial Sequence; identical to SEQ ID NO: 479
  Chemically Synthesized

SEQ ID NO: 481 - protein, 35 aa, Artificial Sequence; identical to SEQ ID NO: 477
  Chemically Synthesized

SEQ ID NO: 482 - protein, 35 aa, Artificial Sequence; identical to SEQ ID NO: 477
  Chemically Synthesized

SEQ ID NO: 483 - protein, 29 aa, Artificial Sequence
  Chemically Synthesized
KKRKRRSKKINKLTDGQIRINHVSSEKKR

SEQ ID NO: 484 - protein, 37 aa, Artificial Sequence
  Chemically Synthesized
KKRSKLTSKHAETADSQSSAASSDHESGQSQAHTKKR

SEQ ID NO: 485 - protein, 39 aa, Artificial Sequence
  Chemically Synthesized
KKRDAETADIGDQSEVESDTEELKKIMFGEKKKLNKKKR

SEQ ID NO: 486 - protein, 29 aa, Artificial Sequence
  Chemically Synthesized
KKRAGGTKRKKATAEPSDNDILSQMTKKR

SEQ ID NO: 487 - protein, 35 aa, Artificial Sequence; identical to SEQ ID NO: 477
  Chemically Synthesized

SEQ ID NO: 488 - protein, 33 aa, Artificial Sequence
  Chemically Synthesized
KKRVYYDDGLTEEQFLEAVEDDNMSLEDAIKKR

SEQ ID NO: 489 - protein, 43 aa, Artificial Sequence
  Chemically Synthesized
KKRSAKIKKATFDANKKKEVGISDLTLLSKISDESINENLKKR

SEQ ID NO: 490 - protein, 37 aa, Artificial Sequence
  Chemically Synthesized
KKRKRLESEQEQDQDEIASDSDMEDIDSDLENNSKKR

SEQ ID NO: 491 - protein, 26 aa, Artificial Sequence
  Chemically Synthesized
KKRGHNSIIGHEKTNALETLKKKKKR

SEQ ID NO: 492 - protein, 35 aa, Artificial Sequence; identical to SEQ ID NO: 456
  Chemically Synthesized

SEQ ID NO: 493 - protein, 35 aa, Artificial Sequence; identical to SEQ ID NO: 456
  Chemically Synthesized

SEQ ID NO: 494 - protein, 35 aa, Artificial Sequence
  Chemically Synthesized
KKRAHSSGERRSSVSKPARDPSDKPEESPSKKKKR

SEQ ID NO: 495 - protein, 42 aa, Artificial Sequence
  Chemically Synthesized
KKRLKSSLRFRKLEILLELPFFIPFEERVDLFYMFIALDKKR

SEQ ID NO: 496 - protein, 35 aa, Artificial Sequence
  Chemically Synthesized
KKRMQAVFTNVHKFKPDASRDESKETYYIGLKKKR

SEQ ID NO: 497 - protein, 35 aa, Artificial Sequence
  Chemically Synthesized
KKRKPTEVNDSENNSSEEDKKKGQNVTSETHSKKR

SEQ ID NO: 498 - protein, 42 aa, Artificial Sequence
  Chemically Synthesized
KKREAEAQWCRIHGQSCWKRDALPEAEPQWCRIHGQSCWKKR

SEQ ID NO: 499 - protein, 35 aa, Artificial Sequence; identical to SEQ ID NO: 456
  Chemically Synthesized

SEQ ID NO: 500 - protein, 35 aa, Artificial Sequence; identical to SEQ ID NO: 477
  Chemically Synthesized

SEQ ID NO: 501 - protein, 35 aa, Artificial Sequence; identical to SEQ ID NO: 456
  Chemically Synthesized

SEQ ID NO: 502 - protein, 35 aa, Artificial Sequence; identical to SEQ ID NO: 456
  Chemically Synthesized

SEQ ID NO: 503 - protein, 45 aa, Artificial Sequence
  Chemically Synthesized
KKRKDPDSDDWSESNSKENKIDNKHLNLLSSDSEIEQDYQKAKKR

SEQ ID NO: 504 - protein, 35 aa, Artificial Sequence; identical to SEQ ID NO: 456
  Chemically Synthesized

SEQ ID NO: 505 - protein, 35 aa, Artificial Sequence; identical to SEQ ID NO: 456
  Chemically Synthesized

SEQ ID NO: 506 - protein, 35 aa, Artificial Sequence
  Chemically Synthesized
KKRVIDDEDDKEVDTTLPGWGEWAGAGSKPKNKKR

SEQ ID NO: 507 - protein, 35 aa, Artificial Sequence; identical to SEQ ID NO: 456
  Chemically Synthesized

SEQ ID NO: 508 - protein, 35 aa, Artificial Sequence; identical to SEQ ID NO: 456
  Chemically Synthesized

SEQ ID NO: 509 - protein, 26 aa, Artificial Sequence
  Chemically Synthesized
KKRRRGNGKHLSRKEKRKMERADKKR

SEQ ID NO: 510 - protein, 35 aa, Artificial Sequence; identical to SEQ ID NO: 456
  Chemically Synthesized

SEQ ID NO: 511 - protein, 40 aa, Artificial Sequence
  Chemically Synthesized
KKRNGSMHNMYYASVPFLLFSNAYSIDFSRHVNEFLEKKR

SEQ ID NO: 512 - protein, 35 aa, Artificial Sequence; identical to SEQ ID NO: 477
  Chemically Synthesized

SEQ ID NO: 513 - protein, 35 aa, Artificial Sequence; identical to SEQ ID NO: 456
  Chemically Synthesized

SEQ ID NO: 514 - protein, 28 aa, Artificial Sequence
  Chemically Synthesized
KKRYMTTKQTRTVQNQTMPRSNTTTKKR

SEQ ID NO: 515 - protein, 37 aa, Artificial Sequence
  Chemically Synthesized
KKREFEAAPAKTYADFLRAYQSWNTFVNPDRPNLKKR

SEQ ID NO: 516 - protein, 37 aa, Artificial Sequence
  Chemically Synthesized
KKREFEAAPEKSYADFLRAYHSWNTFVNPDRPNLKKR

SEQ ID NO: 517 - protein, 37 aa, Artificial Sequence; identical to SEQ ID NO: 515
  Chemically Synthesized

SEQ ID NO: 518 - protein, 46 aa, Artificial Sequence
  Chemically Synthesized
KKRDKKKQLKLAKEEERQRREAERLAEQAAQKALEAKRQEEARKKR

SEQ ID NO: 519 - protein, 26 aa, Artificial Sequence
  Chemically Synthesized
KKREALLNIEEGRDVKGNRMVGMKKR

SEQ ID NO: 520 - protein, 35 aa, Artificial Sequence; identical to SEQ ID NO: 456
  Chemically Synthesized

SEQ ID NO: 521 - protein, 35 aa, Artificial Sequence; identical to SEQ ID NO: 456
  Chemically Synthesized

SEQ ID NO: 522 - protein, 35 aa, Artificial Sequence; identical to SEQ ID NO: 477
  Chemically Synthesized

SEQ ID NO: 523 - protein, 35 aa, Artificial Sequence; identical to SEQ ID NO: 456
  Chemically Synthesized

SEQ ID NO: 524 - protein, 35 aa, Artificial Sequence; identical to SEQ ID NO: 456
  Chemically Synthesized

SEQ ID NO: 525 - protein, 35 aa, Artificial Sequence; identical to SEQ ID NO: 456
  Chemically Synthesized

SEQ ID NO: 526 - protein, 35 aa, Artificial Sequence; identical to SEQ ID NO: 456
  Chemically Synthesized

SEQ ID NO: 527 - protein, 35 aa, Artificial Sequence; identical to SEQ ID NO: 456
  Chemically Synthesized

SEQ ID NO: 528 - protein, 35 aa, Artificial Sequence; identical to SEQ ID NO: 477
  Chemically Synthesized

SEQ ID NO: 529 - protein, 41 aa, Artificial Sequence
  Chemically Synthesized
KKRKLGPKAPNPLSVKKKKKVNSPSDEVKDKEDTSKEKKKR

SEQ ID NO: 530 - protein, 35 aa, Artificial Sequence; identical to SEQ ID NO: 456
  Chemically Synthesized

SEQ ID NO: 531 - protein, 35 aa, Artificial Sequence; identical to SEQ ID NO: 477
  Chemically Synthesized

SEQ ID NO: 532 - protein, 35 aa, Artificial Sequence; identical to SEQ ID NO: 456
  Chemically Synthesized

SEQ ID NO: 533 - protein, 35 aa, Artificial Sequence; identical to SEQ ID NO: 477
  Chemically Synthesized

SEQ ID NO: 534 - protein, 35 aa, Artificial Sequence; identical to SEQ ID NO: 477
  Chemically Synthesized

SEQ ID NO: 535 - protein, 31 aa, Artificial Sequence
  Chemically Synthesized
KKRKGGNGSSDEEEDSDDDMAGKDKGKRKKR

SEQ ID NO: 536 - protein, 45 aa, Artificial Sequence
  Chemically Synthesized
KKRKRKHGGSGNAALTSANAAKSLVKTTLSSKGEASAEKQEMKKR

SEQ ID NO: 537 - protein, 26 aa, Artificial Sequence
  Chemically Synthesized
KKRKADRRSDKEDDKLGKKEKKSKKR

SEQ ID NO: 538 - protein, 44 aa, Artificial Sequence
  Chemically Synthesized
KKRDKKEKKERRDKKEKKEKRRIEKAAAESGAETGDSISEEKKR

SEQ ID NO: 539 - protein, 46 aa, Artificial Sequence
  Chemically Synthesized
KKRTAPKDDDFVLTLSDDENDVFSGINEDGDDHLDEETAKSTTKKR

SEQ ID NO: 540 - protein, 42 aa, Artificial Sequence
  Chemically Synthesized
KKRVDEAREKRVGRFRDGMGSKKELKGREDIRKARIEKEKKR

SEQ ID NO: 541 - protein, 34 aa, Artificial Sequence
  Chemically Synthesized
KKRIDRVDWMYATPATTGSGSAAEMEDYLLGKKR

SEQ ID NO: 542 - protein, 34 aa, Artificial Sequence
  Chemically Synthesized
KKRKTSDRETQNVTTKKQKIETIERKKSSLKKKR

SEQ ID NO: 543 - protein, 45 aa, Artificial Sequence
  Chemically Synthesized
KKRAAARDDDFVLTLSDDENDIFENGVEEDGDNAQEDTLSSSKKR

SEQ ID NO: 544 - protein, 42 aa, Artificial Sequence; identical to SEQ ID NO: 443
  Chemically Synthesized

SEQ ID NO: 545 - protein, 41 aa, Artificial Sequence
  Chemically Synthesized
KKRLQQLAKEEERKRKEEELKAKEEEQRLQKEKLKAEQKKR

SEQ ID NO: 546 - protein, 37 aa, Artificial Sequence
  Chemically Synthesized
KKRSEIERYSKMFWQNYQKIEGYEKYLSQIEAVEKKR

SEQ ID NO: 547 - protein, 27 aa, Artificial Sequence
  Chemically Synthesized
KKRVAPLLVSTSAAPKNVLQKPLEKKR

SEQ ID NO: 548 - protein, 26 aa, Artificial Sequence
  Chemically Synthesized
KKRAAKKRQEEEELERQKMMMSRKKR

SEQ ID NO: 549 - protein, 46 aa, Artificial Sequence
  Chemically Synthesized
KKRSAEDEEKDLKKIMMSNKQRKLYKKMQYGIDKKEARQDDLTKKR

SEQ ID NO: 550 - protein, 44 aa, Artificial Sequence
  Chemically Synthesized
KKRGSEAVEESDSDSEESESESDDDKKSRKSSKKEKKDKKSKKR

SEQ ID NO: 551 - protein, 41 aa, Artificial Sequence
  Chemically Synthesized
KKRAEKSRTPLTSSTAVISDRPVASVSADTTLVGSVASKKR

SEQ ID NO: 552 - protein, 34 aa, Artificial Sequence
  Chemically Synthesized
KKRFSGSSVTVAMTTAAAAAARLTAFKVTKPKKR

SEQ ID NO: 553 - protein, 28 aa, Artificial Sequence
  Chemically Synthesized
KKREVGVSDLTLLSKVSEEAINENLKKR

SEQ ID NO: 554 - protein, 33 aa, Artificial Sequence
  Chemically Synthesized
KKRLKRTKVPSKIWVDNLNMEYIYAKGESIKKR

SEQ ID NO: 555 - protein, 39 aa, Artificial Sequence
  Chemically Synthesized
KKRYKSELDRAEAIERQLIREEEHLKSLQEKGETQAKKR

SEQ ID NO: 556 - protein, 41 aa, Artificial Sequence
  Chemically Synthesized
KKRKLEVKSDQQTPPATQSEINHTSSVRLEENIQGIKRKKR

SEQ ID NO: 557 - protein, 39 aa, Artificial Sequence
  Chemically Synthesized
KKRGQAAKEAVEVDLVDVGDYVKKATERFQHTVELHKKR

SEQ ID NO: 558 - protein, 33 aa, Artificial Sequence
  Chemically Synthesized
KKRQRKRRREAGSGDEEDEGVSDEVLAARAKKR

SEQ ID NO: 559 - protein, 42 aa, Artificial Sequence
  Chemically Synthesized
KKRVAEAKEKRIGKYKDGEGSKRELKTATDIRKARAVAEKKR

SEQ ID NO: 560 - protein, 34 aa, Artificial Sequence
  Chemically Synthesized
KKRDPPPRPKYEVFTDAQLSREIASYGFKPIKKR

SEQ ID NO: 561 - protein, 39 aa, Artificial Sequence
  Chemically Synthesized
KKRGISALMAKAKEASDVATNGYFKHWDGGVSEDDEKKR

SEQ ID NO: 562 - protein, 28 aa, Artificial Sequence
  Chemically Synthesized
KKRQSKRLTTRKREGMLKRARANERKKR

SEQ ID NO: 563 - protein, 27 aa, Artificial Sequence
  Chemically Synthesized
KKRKKKTVKELNRIRRASRISKKEKKR

SEQ ID NO: 564 - protein, 38 aa, Artificial Sequence
  Chemically Synthesized
KKRKKKTVKELNRIRRASRISKKEKKRIFKRYIGMKKR

SEQ ID NO: 565 - protein, 35 aa, Artificial Sequence; identical to SEQ ID NO: 456
  Chemically Synthesized

SEQ ID NO: 566 - protein, 41 aa, Artificial Sequence
  Chemically Synthesized
KKRTGSQYSYYNGGHNVESTNENKLVDASDLLANVDILKKR

SEQ ID NO: 567 - protein, 35 aa, Artificial Sequence; identical to SEQ ID NO: 456
  Chemically Synthesized

SEQ ID NO: 568 - protein, 35 aa, Artificial Sequence; identical to SEQ ID NO: 456
  Chemically Synthesized

SEQ ID NO: 569 - protein, 40 aa, Artificial Sequence
  Chemically Synthesized
KKRVWSREKRLLSEMAITNHSPLLNVDDYRKFREDLWKKR

SEQ ID NO: 570 - protein, 33 aa, Artificial Sequence
  Chemically Synthesized
KKRKRRAKAAEREAQEAEELSMELGLDENLKKR

SEQ ID NO: 571 - protein, 35 aa, Artificial Sequence
  Chemically Synthesized
KKRRRSSSYSPSPVKKKKKKSSKKHKRRRSFSKKR

SEQ ID NO: 572 - protein, 40 aa, Artificial Sequence
  Chemically Synthesized
KKRKKPKGKETFEPEDKTVKQEQINTEPLEDTVLSPTKKR

SEQ ID NO: 573 - protein, 42 aa, Artificial Sequence
  Chemically Synthesized
KKRKKQSQESRMPETVPQEEMPGPPLNSESGEEAPTGRDKKR

SEQ ID NO: 574 - protein, 43 aa, Artificial Sequence
  Chemically Synthesized
KKRKRQKGTEGMEPEEGVTVESQPQVKVEPLEEAIPLPPTKKR

SEQ ID NO: 575 - protein, 26 aa, Artificial Sequence
  Chemically Synthesized
KKRKLDPEIVPEEKDCGDAEGNSKKR

SEQ ID NO: 576 - protein, 46 aa, Artificial Sequence
  Chemically Synthesized
KKRSSIWQFFSRLFSSSSNTTKKPEPPVNLKYNAPTSHVTPSVKKR

SEQ ID NO: 577 - protein, 36 aa, Artificial Sequence
  Chemically Synthesized
KKRRAPPPPGSGPPVQDKASEKVSLGSQIDLQKKKR

SEQ ID NO: 578 - protein, 37 aa, Artificial Sequence
  Chemically Synthesized
KKRQRSESRSASEHSSSAESERSYKKSKKHKKKSKKR

SEQ ID NO: 579 - protein, 32 aa, Artificial Sequence
  Chemically Synthesized
KKRKALEFVTNPDIAAKKKMKKHKNKSEAKKR

SEQ ID NO: 580 - protein, 45 aa, Artificial Sequence
  Chemically Synthesized
KKRFRQLSILVHPDKNQDDADRAQKAFEAVDKAYKLLLDQEQKKR

SEQ ID NO: 581 - protein, 45 aa, Artificial Sequence
  Chemically Synthesized
KKRQQARKTASVLSKDDVAPESGDTTVKKPESKKEQTPEHGKKKR

SEQ ID NO: 582 - protein, 42 aa, Artificial Sequence
  Chemically Synthesized
KKRARLEEENEELRQRLIETELAKQVLQTELERPREHSLKKR

SEQ ID NO: 583 - protein, 35 aa, Artificial Sequence
  Chemically Synthesized
KKRRHRSKVNGLQRGRKKDRPRKHLTLNNKVQKKR

SEQ ID NO: 584 - protein, 30 aa, Artificial Sequence
  Chemically Synthesized
KKRRKEKKVKHKKKGKKQKHCRRHKQTKKR

SEQ ID NO: 585 - protein, 26 aa, Artificial Sequence
  Chemically Synthesized
KKRPRNSYKCGTNTMEREESEQTKKR

SEQ ID NO: 586 - protein, 35 aa, Artificial Sequence
  Chemically Synthesized
KKRQTQSESSNYDSELEKEIKSMSKIGAARTTKKR

SEQ ID NO: 587 - protein, 41 aa, Artificial Sequence
  Chemically Synthesized
KKRGRKPGSVVAAAAAEAKKKAVKESSIRSVQETVLPIKKR

SEQ ID NO: 588 - protein, 27 aa, Artificial Sequence
  Chemically Synthesized
KKRGDGFVNESRLQKIVSVIDEEIKKR

SEQ ID NO: 589 - protein, 27 aa, Artificial Sequence
  Chemically Synthesized
KKRKERFGIVTSSAGTGTTEDTEAKKR

SEQ ID NO: 590 - protein, 40 aa, Artificial Sequence
  Chemically Synthesized
KKRKREESVEQKRSKQNATKLSALLFKHKEQLRAEILKKR

SEQ ID NO: 591 - protein, 33 aa, Artificial Sequence
  Chemically Synthesized
KKRKEEERKKKETDQKKEAVAPVQEESDLEKKR

SEQ ID NO: 592 - protein, 43 aa, Artificial Sequence
  Chemically Synthesized
KKRHKSSSSSSSSSSDSDSSSDSQSSSDSSDSESATEEKSKKR

SEQ ID NO: 593 - protein, 34 aa, Artificial Sequence
  Chemically Synthesized
KKRKKDFQHLISSPLKKSRICDETANATSTLKKR

SEQ ID NO: 594 - protein, 37 aa, Artificial Sequence
  Chemically Synthesized
KKRKKDFQHLISSPLKKSRICDETANATSTLKKRKKR

SEQ ID NO: 595 - protein, 45 aa, Artificial Sequence
  Chemically Synthesized
KKRDQTASAPATPLVNKHRPTFTRSNTISKPYISNTLPSDAPKKR

SEQ ID NO: 596 - protein, 36 aa, Artificial Sequence
  Chemically Synthesized
KKRKNKSSKRKHRKYSDSDSNSESDTNSDSDDDKKR

SEQ ID NO: 597 - protein, 39 aa, Artificial Sequence
  Chemically Synthesized
KKRRQKEEEEATASERNDADEKHPEHAEQNIRKSKKKKR

SEQ ID NO: 598 - protein, 46 aa, Artificial Sequence
  Chemically Synthesized
KKRQQQEEEDLNLEDRGEETVLGGGTREAESRACSDGRSRKSKKKR

SEQ ID NO: 599 - protein, 38 aa, Artificial Sequence
  Chemically Synthesized
KKRIELKHDKKARAMAKRTKDNFHGYNGIPIEEKSKKR

SEQ ID NO: 600 - protein, 41 aa, Artificial Sequence
  Chemically Synthesized
KKRIERFYNCLQHALERETMTNLHPKIKEKNNSSYIHKKKR

SEQ ID NO: 601 - protein, 26 aa, Artificial Sequence
  Chemically Synthesized
KKRRKGSGSEQEGEDEEGGERKKKKR

SEQ ID NO: 602 - protein, 27 aa, Artificial Sequence
  Chemically Synthesized
KKRRRHPKGEEGSDDDETENGPKPKKR

SEQ ID NO: 603 - protein, 37 aa, Artificial Sequence
  Chemically Synthesized
KKRGGGGGRRSKKGGEFDEFVNDDTDDDLPISKKKKR

SEQ ID NO: 604 - protein, 36 aa, Artificial Sequence
  Chemically Synthesized
KKRTALHLACANGNSEVVSLLLDRQCQLHVFDSKKR

SEQ ID NO: 605 - protein, 39 aa, Artificial Sequence
  Chemically Synthesized
KKRKRKEEGEKEKKPRKKVPKQLGVVALNSHKSEKKKKR

SEQ ID NO: 606 - protein, 46 aa, Artificial Sequence
  Chemically Synthesized
KKRLDGIEEVEREITRGRSRKGSELTCPEDNKIKELTLEIERLKKR

SEQ ID NO: 607 - protein, 33 aa, Artificial Sequence
  Chemically Synthesized
KKRKKSYPDDKPLSSESSSESDYEEDVQAKKKR

SEQ ID NO: 608 - protein, 43 aa, Artificial Sequence
  Chemically Synthesized
KKRKALEAKKEEEEIQREMVKLRREIIERRRTVKAAWKIEKKR

SEQ ID NO: 609 - protein, 37 aa, Artificial Sequence
  Chemically Synthesized
KKRKRCGVCEPCQQKTNCGECTYCKNRKNSHQICKKR

SEQ ID NO: 610 - protein, 39 aa, Artificial Sequence
  Chemically Synthesized
KKRMEAEQEMVRMVRAATLIQALWKGYLVRSLLRSKKKR

SEQ ID NO: 611 - protein, 31 aa, Artificial Sequence
  Chemically Synthesized
KKRGRTPKTLISHPISAPSKTAEPLKFPKKR

SEQ ID NO: 612 - protein, 27 aa, Artificial Sequence
  Chemically Synthesized
KKRVGDGSVLRTIHGKEMSKIARKKKR

SEQ ID NO: 613 - protein, 35 aa, Artificial Sequence
  Chemically Synthesized
KKRKDEGKSRTTLPERPLTEVKAETRAEEAPEKKR

SEQ ID NO: 614 - protein, 32 aa, Artificial Sequence
  Chemically Synthesized
KKRKSEDGTPAEDGTPAATGGSQPPSMGRKKR

SEQ ID NO: 615 - protein, 35 aa, Artificial Sequence
  Chemically Synthesized
KKRKKRKSEDGTPAEDGTPAATGGSQPPSMGRKKR

SEQ ID NO: 616 - protein, 33 aa, Artificial Sequence
  Chemically Synthesized
KKRKKISGPNPLSCLKKKKKAPDTQSSASEKKR

SEQ ID NO: 617 - protein, 32 aa, Artificial Sequence
  Chemically Synthesized
KKRSREDAGDNDDTEGAIGVRNKVAGGKMKKR

SEQ ID NO: 618 - protein, 42 aa, Artificial Sequence
  Chemically Synthesized
KKRKGSSSQAPASKKLNKEELPVIPKGKPKSGRVWKDRSKKR

SEQ ID NO: 619 - protein, 44 aa, Artificial Sequence
  Chemically Synthesized
KKRSKLKHRDLEVSCEPDGFEMNFQCAPPLPSDTDQPQETVKKR

SEQ ID NO: 620 - protein, 45 aa, Artificial Sequence
  Chemically Synthesized
KKRRKKSAGERLKEEKPKKSKTSGASKTKGKSKLNTITPVVGKKR

SEQ ID NO: 621 - protein, 29 aa, Artificial Sequence
  Chemically Synthesized
KKRKKGEKQIPGEEKGRKRRRVKEDKKKR

SEQ ID NO: 622 - protein, 32 aa, Artificial Sequence
  Chemically Synthesized
KKREAEEKEKRVRIAKELAERERLERQQKKKR

SEQ ID NO: 623 - protein, 31 aa, Artificial Sequence
  Chemically Synthesized
KKRAATTVLQELKKLPPLPVVEKPKLFFKKR

SEQ ID NO: 624 - protein, 34 aa, Artificial Sequence
  Chemically Synthesized
KKRGLTGDSKKATKESGLISTKKRKMVEMLEKKR

SEQ ID NO: 625 - protein, 27 aa, Artificial Sequence
  Chemically Synthesized
KKRKREKKELKLENHQENSRNQKPKKR

SEQ ID NO: 626 - protein, 44 aa, Artificial Sequence
  Chemically Synthesized
KKRSYKDFLREEEEIAAQVRNSSKKKLKDSELYFLGTDTHKKKR

SEQ ID NO: 627 - protein, 34 aa, Artificial Sequence
  Chemically Synthesized
KKRQLLDSDEEQEEDEGRNRAPELGAPGIQKKKR

SEQ ID NO: 628 - protein, 38 aa, Artificial Sequence
  Chemically Synthesized
KKRGKKKHIKEEPLSEEEPCTSTAIASPEKKKKKKKKR

SEQ ID NO: 629 - protein, 39 aa, Artificial Sequence
  Chemically Synthesized
KKRGRPKKQPLLTVETIHEGTSTSPVSPISREFPGTKKR

SEQ ID NO: 630 - protein, 40 aa, Artificial Sequence
  Chemically Synthesized
KKRKGKVKKTKKKKTSNKKEKTKKSKSKNKKDAKKKAKKR

SEQ ID NO: 631 - protein, 41 aa, Artificial Sequence
  Chemically Synthesized
KKRKFTKEDAIYGVFNDGWGDYEDEEESKMTEEEYYKMKKR

SEQ ID NO: 632 - protein, 32 aa, Artificial Sequence
  Chemically Synthesized
KKRKRATTTEEPQGSRNELVALENIEGIYKKR

SEQ ID NO: 633 - protein, 38 aa, Artificial Sequence
  Chemically Synthesized
KKRGPKKKKYKPEAAEVEKKNEEGDTVKENPIAEAKKR

SEQ ID NO: 634 - protein, 40 aa, Artificial Sequence
  Chemically Synthesized
KKRINEVSTTEGAPAEKKKKVEKWLNTSSEDGEGTKKKKR

SEQ ID NO: 635 - protein, 32 aa, Artificial Sequence
  Chemically Synthesized
KKRNFDEIDRSSMPFPYATKRFYHLSSFDKKR

SEQ ID NO: 636 - protein, 46 aa, Artificial Sequence
  Chemically Synthesized
KKRKNIKLFLNIINSNEYINVNKIFHGKCIYELPFYVNKERIKKKR

SEQ ID NO: 637 - protein, 26 aa, Artificial Sequence
  Chemically Synthesized
KKRKAMVEELIKRGYAPDPIADWKKR

SEQ ID NO: 638 - protein, 44 aa, Artificial Sequence
  Chemically Synthesized
KKRRGRKPKKKDDPKMELKDEVKDLKDFVVEESTSASSSAPKKR

SEQ ID NO: 639 - protein, 32 aa, Artificial Sequence
  Chemically Synthesized
KKRLEKENRKIKEEDDEDSDDEDDEKAKKKKR

SEQ ID NO: 640 - protein, 44 aa, Artificial Sequence
  Chemically Synthesized
KKRKRGPKKKKFKPEVAGKAAETENDDVAAAPEEADPIAEAKKR

SEQ ID NO: 641 - protein, 46 aa, Artificial Sequence
  Chemically Synthesized
KKRKITDEKDAQHVPAEKREKVENWLKKSTEKPTSSQSDAEKKKKR

SEQ ID NO: 642 - protein, 29 aa, Artificial Sequence
  Chemically Synthesized
KKRDDNKDKEGSSMDKLREESRRQYLKKR

SEQ ID NO: 643 - protein, 35 aa, Artificial Sequence
  Chemically Synthesized
KKRVTSKSRTKRVKMFKQCQWVDADNQRDIKRKKR

SEQ ID NO: 644 - protein, 38 aa, Artificial Sequence
  Chemically Synthesized
KKRMTEKDISSSESSISESKSLNCSASNQNENEKRKKR

SEQ ID NO: 645 - protein, 35 aa, Artificial Sequence; identical to SEQ ID NO: 643
  Chemically Synthesized

SEQ ID NO: 646 - protein, 38 aa, Artificial Sequence; identical to SEQ ID NO: 644
  Chemically Synthesized

SEQ ID NO: 647 - protein, 35 aa, Artificial Sequence; identical to SEQ ID NO: 643
  Chemically Synthesized

SEQ ID NO: 648 - protein, 38 aa, Artificial Sequence; identical to SEQ ID NO: 644
  Chemically Synthesized

SEQ ID NO: 649 - protein, 35 aa, Artificial Sequence; identical to SEQ ID NO: 643
  Chemically Synthesized

SEQ ID NO: 650 - protein, 38 aa, Artificial Sequence; identical to SEQ ID NO: 644
  Chemically Synthesized

SEQ ID NO: 651 - protein, 34 aa, Artificial Sequence
  Chemically Synthesized
KKRGRPKKPKDENESDYNNTSFSDSNTDGTPKKR

SEQ ID NO: 652 - protein, 30 aa, Artificial Sequence
  Chemically Synthesized
KKRGRPSKASVGGKSSTAAVAAISPGIKKR

SEQ ID NO: 653 - protein, 32 aa, Artificial Sequence
  Chemically Synthesized
KKRANRKKANNNKKRASNNRKKANNNNNNKKR

SEQ ID NO: 654 - protein, 41 aa, Artificial Sequence
  Chemically Synthesized
KKRDWYIQPTCARSGDGLYQGLDWLSDYIFDKKNKKKGKKR

SEQ ID NO: 655 - protein, 35 aa, Artificial Sequence
  Chemically Synthesized
KKRHLEDSLDMLNEEIVKLRAAEEIRLTDQEDKKR

SEQ ID NO: 656 - protein, 35 aa, Artificial Sequence
  Chemically Synthesized
KKRNNVFLTITDVIGRVVVSQSAGSCKITTKKKKR

SEQ ID NO: 657 - protein, 44 aa, Artificial Sequence
  Chemically Synthesized
KKRYYLFFSKKRNNVFLTITDVIGRVVVSQSAGSCKITTKKKKR

SEQ ID NO: 658 - protein, 37 aa, Artificial Sequence
  Chemically Synthesized
KKREIEIQQQLELQEETTLEIRERNVSLEQEVELKKR

SEQ ID NO: 659 - protein, 43 aa, Artificial Sequence
  Chemically Synthesized
KKRWFILKGGDLSYYKTKGELVPLGVIHLNTSGHIKNSDRKKR

SEQ ID NO: 660 - protein, 45 aa, Artificial Sequence
  Chemically Synthesized
KKRPNRLIIDQSDNDDNSMVMLSQAKMDELGLFRGDSVILKGKKR

SEQ ID NO: 661 - protein, 31 aa, Artificial Sequence
  Chemically Synthesized
KKRKGKGKKRGKGRRRGSKGRKKKKGKGKKR

SEQ ID NO: 662 - protein, 35 aa, Artificial Sequence
  Chemically Synthesized
KKRARSPSKKARRRSRSTKKTAAKRRKRSSSPKKR

SEQ ID NO: 663 - protein, 26 aa, Artificial Sequence
  Chemically Synthesized
KKREAEKKKCAKLAKKEKEAAEKKKR

SEQ ID NO: 664 - protein, 27 aa, Artificial Sequence
  Chemically Synthesized
KKRCKDLAKNKKKGHKKKGRNENRKKR

SEQ ID NO: 665 - protein, 35 aa, Artificial Sequence
  Chemically Synthesized
KKRKEAAEKKKCEKAAKKRKEAAEKKKCEKSAKKR

SEQ ID NO: 666 - protein, 35 aa, Artificial Sequence
  Chemically Synthesized
KKRKEEAEKKKCEKTAKKRKEAAEKKKCEKAAKKR

SEQ ID NO: 667 - protein, 35 aa, Artificial Sequence
  Chemically Synthesized
KKRKEAAEKKKCEKAAKKRKEEAEKKKCEKTAKKR

SEQ ID NO: 668 - protein, 35 aa, Artificial Sequence
  Chemically Synthesized
KKRKEEAEKKKCEKTAKKRKETAEKKKCEKAAKKR

SEQ ID NO: 669 - protein, 35 aa, Artificial Sequence
  Chemically Synthesized
KKRKETAEKKKCEKAAKKRKQAAEKKKCEKAAKKR

SEQ ID NO: 670 - protein, 29 aa, Artificial Sequence
  Chemically Synthesized
KKRGSKTSELKQNETTDAVVVNNEKVKKR

SEQ ID NO: 671 - protein, 26 aa, Artificial Sequence
  Chemically Synthesized
KKRKSAIDVLKMPLFDILRSSPPKKR

SEQ ID NO: 672 - protein, 42 aa, Artificial Sequence
  Chemically Synthesized
KKRFNLNLEEARQAFQTFKPDWNKIRYDAMKMQTSLGQMKKR

SEQ ID NO: 673 - protein, 38 aa, Artificial Sequence
  Chemically Synthesized
KKRSDKRARSESKSRSRSGGRRSRSNSPPNRSPSPKKR

SEQ ID NO: 674 - protein, 34 aa, Artificial Sequence
  Chemically Synthesized
KKRGVVLKPSVDEETDRRRMLNRIAAVRYREKKR

SEQ ID NO: 675 - protein, 36 aa, Artificial Sequence
  Chemically Synthesized
KKRFHEMAEKDKQRYEAEMQNYVPPKGAVVGRGKKR

SEQ ID NO: 676 - protein, 36 aa, Artificial Sequence
  Chemically Synthesized
KKRQHSSRSNESVSSSTSTEKSHKKTKKTKMKEKKR

SEQ ID NO: 677 - protein, 37 aa, Artificial Sequence; identical to SEQ ID NO: 658
  Chemically Synthesized

SEQ ID NO: 678 - protein, 30 aa, Artificial Sequence
  Chemically Synthesized
KKRMDDFVSQVGEDRLATYKPFTEDPSKKR

SEQ ID NO: 679 - protein, 28 aa, Artificial Sequence
  Chemically Synthesized
KKRSKKRNSIDSGRKDKSKKRKSKKKKR

SEQ ID NO: 680 - protein, 31 aa, Artificial Sequence
  Chemically Synthesized
KKRDSKNRRSHSKSDENEEGEEDDEERRKKR

SEQ ID NO: 681 - protein, 42 aa, Artificial Sequence
  Chemically Synthesized
KKRLFEDFTNLYIEDDCLLSCSFSFFIYNKSIHLHFNVDKKR

SEQ ID NO: 682 - protein, 26 aa, Artificial Sequence
  Chemically Synthesized
KKRIPNATEEEIEILEGMLCWNPKKR

SEQ ID NO: 683 - protein, 46 aa, Artificial Sequence
  Chemically Synthesized
KKRKKDRDHNNNNNNNNNNNNNNNEQTSDSSDSSDSDSESRSKKKR

SEQ ID NO: 684 - protein, 26 aa, Artificial Sequence
  Chemically Synthesized
KKRAAEQKIIDDEKARLKSIENSKKR

SEQ ID NO: 685 - protein, 38 aa, Artificial Sequence
  Chemically Synthesized
KKRKCNFSSPLLFSPFKYGVTSPFSPSKMKLKSPFKKR

SEQ ID NO: 686 - protein, 36 aa, Artificial Sequence
  Chemically Synthesized
KKRLKREKRLKEKQDLLLIKLEKQKEKQLEEQMKKR

SEQ ID NO: 687 - protein, 27 aa, Artificial Sequence
  Chemically Synthesized
KKRIKFTHMVGRGQYGKVYDALYDKKR

SEQ ID NO: 688 - protein, 35 aa, Artificial Sequence
  Chemically Synthesized
KKRREKEARKMKRAGGRFKSRATGANAEEKRAKKR

SEQ ID NO: 689 - protein, 39 aa, Artificial Sequence
  Chemically Synthesized
KKRLQKEEQDRLAAAELERKRLEKEAEEKRIAQELEKKR

SEQ ID NO: 690 - protein, 31 aa, Artificial Sequence
  Chemically Synthesized
KKRKITSSEYGMSLEFFKKNPKKVVQNLKKR

SEQ ID NO: 691 - protein, 41 aa, Artificial Sequence
  Chemically Synthesized
KKRDLIKNNKLIHNVDVNYINMITNDNHISSEKCRDIKKKR

SEQ ID NO: 692 - protein, 46 aa, Artificial Sequence
  Chemically Synthesized
KKRIYGYLFYTTLLKNITSLNNLFVHYILNNYFFFHSKSMYMLKKR

SEQ ID NO: 693 - protein, 31 aa, Artificial Sequence
  Chemically Synthesized
KKRIFIYENTVYYTPDDCVFCTQLNCTIKKR

SEQ ID NO: 694 - protein, 44 aa, Artificial Sequence
  Chemically Synthesized
KKRRNEETRSARSVGIAAADARQAAIVAEKTSGPSLLEIHQKKR

SEQ ID NO: 695 - protein, 39 aa, Artificial Sequence
  Chemically Synthesized
KKRPGTTSKKSIATVTASPEMSSKTTQMEPEQDGEGKKR

SEQ ID NO: 696 - protein, 29 aa, Artificial Sequence
  Chemically Synthesized
KKRLARGGHVEDPTADPLDISLPSSKKKR

SEQ ID NO: 697 - protein, 27 aa, Artificial Sequence
  Chemically Synthesized
KKRSDESDDDNIGLVARGSPRFFGKKR

SEQ ID NO: 698 - protein, 45 aa, Artificial Sequence
  Chemically Synthesized
KKRADDEDILLGERGSPRFFGKKRANDENISFSLRGSPRFFGKKR

SEQ ID NO: 699 - protein, 46 aa, Artificial Sequence
  Chemically Synthesized
KKRSDDNVALDLRGSPRFFGKRQSSDLDDEISVALRGSPRFFGKKR

SEQ ID NO: 700 - protein, 34 aa, Artificial Sequence
  Chemically Synthesized
KKRTEDGRPTLSAHPARFSPEDKYSRQRLTIKKR

SEQ ID NO: 701 - protein, 32 aa, Artificial Sequence
  Chemically Synthesized
KKRRVEKKKSKTKWTERKQKVEHDKEKRQKKR

SEQ ID NO: 702 - protein, 37 aa, Artificial Sequence
  Chemically Synthesized
KKRPRQPRKRIVMVEEVKRKIRTPIKEEEEVQERKKR

SEQ ID NO: 703 - protein, 33 aa, Artificial Sequence
  Chemically Synthesized
KKRVQILYIESESEDEDEQDSHDKSLDSPEKKR

SEQ ID NO: 704 - protein, 34 aa, Artificial Sequence
  Chemically Synthesized
KKRKRGVVNTKAYKETKPAVKKETKATPALHKKR

SEQ ID NO: 705 - protein, 40 aa, Artificial Sequence
  Chemically Synthesized
KKRKCVITLDEKQVESKRLKKEESNVEATSRPPAQSPKKR

SEQ ID NO: 706 - protein, 37 aa, Artificial Sequence
  Chemically Synthesized
KKRKKPQTAAKSSSRSDSDSDWANNKAGAPSSKKKKR

SEQ ID NO: 707 - protein, 39 aa, Artificial Sequence
  Chemically Synthesized
KKRKRKEEGEKEKKPRKKVPKQLGVMALNSHKSEKKKKR

SEQ ID NO: 708 - protein, 33 aa, Artificial Sequence
  Chemically Synthesized
KKRKKVSGPNPLSCLKKKKKTQDTNSSASEKKR

SEQ ID NO: 709 - protein, 33 aa, Artificial Sequence; identical to SEQ ID NO: 591
  Chemically Synthesized

SEQ ID NO: 710 - protein, 40 aa, Artificial Sequence
  Chemically Synthesized
KKRLEDEQEMVRMVRAATLIQALWKGYLVRSMLKSKKKKR

SEQ ID NO: 711 - protein, 32 aa, Artificial Sequence
  Chemically Synthesized
KKRSREDVGDNDDTEGAIGVRNKVAGGKMKKR

SEQ ID NO: 712 - protein, 39 aa, Artificial Sequence
  Chemically Synthesized
KKREEMEEENRKIIEFAKLQQQREEDRMAKVQEKVKKKR

SEQ ID NO: 713 - protein, 31 aa, Artificial Sequence
  Chemically Synthesized
KKRRQYQEEEVLDGPGVNTAQKAKKKKQKKR

SEQ ID NO: 714 - protein, 37 aa, Artificial Sequence
  Chemically Synthesized
KKRKQKEEEEPTTTERSAEKYSEHTDESIRKSKKKKR

SEQ ID NO: 715 - protein, 41 aa, Artificial Sequence
  Chemically Synthesized
KKREGSSAQAPASKKPKEEIPVIPKGKPKSGRVWKDRSKKR

SEQ ID NO: 716 - protein, 26 aa, Artificial Sequence
  Chemically Synthesized
KKRKLDPEIVPEEKDCGDDEGNSKKR

SEQ ID NO: 717 - protein, 39 aa, Artificial Sequence
  Chemically Synthesized
KKRMEAEQEMVRMVRAATLIQAFWKGYLVRSLLRSKKKR

SEQ ID NO: 718 - protein, 45 aa, Artificial Sequence
  Chemically Synthesized
KKRSTSVMSFFSKVSWNLRLQKQEPLKNVFFILAETARDPSVKKR

SEQ ID NO: 719 - protein, 41 aa, Artificial Sequence
  Chemically Synthesized
KKRHKKEKRKKEKDRGRRLDSSLAPAPIQHDSDSSTCCKKR

SEQ ID NO: 720 - protein, 40 aa, Artificial Sequence
  Chemically Synthesized
KKRIERFYHCLQHALEKETVSTTSQPKEKVNTSYIRKKKR

SEQ ID NO: 721 - protein, 33 aa, Artificial Sequence; identical to SEQ ID NO: 591
  Chemically Synthesized

SEQ ID NO: 722 - protein, 27 aa, Artificial Sequence
  Chemically Synthesized
KKRKERFGIVTSSAGTGTTEDTEAKKR

SEQ ID NO: 723 - protein, 29 aa, Artificial Sequence
  Chemically Synthesized
KKRKKGEKQIPGEEKGRKRRRVKEDKKKR

SEQ ID NO: 724 - protein, 42 aa, Artificial Sequence
  Chemically Synthesized
KKRKGSSSLAPASKKLNKEELPVIPKGKPKSGRVWKDRSKKR

SEQ ID NO: 725 - protein, 45 aa, Artificial Sequence; identical to SEQ ID NO: 581
  Chemically Synthesized

SEQ ID NO: 726 - protein, 35 aa, Artificial Sequence
  Chemically Synthesized
KKRKDEGKSRTTPPERPLTEVKAETRAEEAPEKKR

SEQ ID NO: 727 - protein, 35 aa, Artificial Sequence
  Chemically Synthesized
KKRKEEGKSRTTPPERPLTEVKAETRAEEAPEKKR

SEQ ID NO: 728 - protein, 35 aa, Artificial Sequence; identical to SEQ ID NO: 586
  Chemically Synthesized

SEQ ID NO: 729 - protein, 35 aa, Artificial Sequence; identical to SEQ ID NO: 586
  Chemically Synthesized

SEQ ID NO: 730 - protein, 35 aa, Artificial Sequence; identical to SEQ ID NO: 613
  Chemically Synthesized

SEQ ID NO: 731 - protein, 43 aa, Artificial Sequence
  Chemically Synthesized
KKRKALEAKKEEEEIQREMVKLRREIIERRRTVKEAWKIEKKR

SEQ ID NO: 732 - protein, 41 aa, Artificial Sequence; identical to SEQ ID NO: 587
  Chemically Synthesized

SEQ ID NO: 733 - protein, 37 aa, Artificial Sequence
  Chemically Synthesized
KKRILESHNNTLVDPCEEHKKKNPDASVKFSEFLKKR

SEQ ID NO: 734 - protein, 34 aa, Artificial Sequence
  Chemically Synthesized
KKRLRMLAVLGVELVFMLAVILGVLLGAHTHKKR

SEQ ID NO: 735 - protein, 37 aa, Artificial Sequence
  Chemically Synthesized
KKRKRGDDDYALPGDGDLVVECEEEGEKGEKRVKKKR

SEQ ID NO: 736 - protein, 40 aa, Artificial Sequence
  Chemically Synthesized
KKRKKRKRGDDDYALPGDGDLVVECEEEGEKGEKRVKKKR

SEQ ID NO: 737 - protein, 43 aa, Artificial Sequence
  Chemically Synthesized
KKRKRGDDDYALPGDGDLVVECEEEGEKGEKRVKKKRRSRKKR

SEQ ID NO: 738 - protein, 46 aa, Artificial Sequence
  Chemically Synthesized
KKRKKRKRGDDDYALPGDGDLVVECEEEGEKGEKRVKKKRRSRKKR

SEQ ID NO: 739 - protein, 37 aa, Artificial Sequence; identical to SEQ ID NO: 735
  Chemically Synthesized

SEQ ID NO: 740 - protein, 40 aa, Artificial Sequence; identical to SEQ ID NO: 736
  Chemically Synthesized

SEQ ID NO: 741 - protein, 43 aa, Artificial Sequence; identical to SEQ ID NO: 737
  Chemically Synthesized

SEQ ID NO: 742 - protein, 46 aa, Artificial Sequence; identical to SEQ ID NO: 738
  Chemically Synthesized

SEQ ID NO: 743 - protein, 28 aa, Artificial Sequence
  Chemically Synthesized
KKRNPESALLNQEKNIEENYAESTIKKR

SEQ ID NO: 744 - protein, 28 aa, Artificial Sequence
  Chemically Synthesized
KKRNPESALSNQEKNIEKNYAESKIKKR

SEQ ID NO: 745 - protein, 45 aa, Artificial Sequence
  Chemically Synthesized
KKRDKGEKKDFCFLTVWGMETELPFGSAQKKPSFFEPISKELKKR

SEQ ID NO: 746 - protein, 28 aa, Artificial Sequence
  Chemically Synthesized
KKRNPESALLNQEKNIEENFAESMIKKR

SEQ ID NO: 747 - protein, 31 aa, Artificial Sequence
  Chemically Synthesized
KKRQDKKNPGSDAQNQKDVEEDSTRSDSKKR

SEQ ID NO: 748 - protein, 28 aa, Artificial Sequence
  Chemically Synthesized
KKRKKKDEGLDEDDYLLLQDNNVKFKKR

SEQ ID NO: 749 - protein, 27 aa, Artificial Sequence
  Chemically Synthesized
KKRKSLERYGSITSAVSDDKGDTTKKR

SEQ ID NO: 750 - protein, 39 aa, Artificial Sequence
  Chemically Synthesized
KKRHYGGESSLAGTQSSIIMRTAAEMLAVYQACGIKKKR

SEQ ID NO: 751 - protein, 36 aa, Artificial Sequence
  Chemically Synthesized
KKRGRNIDDAEEVENELKRVEDELYKIPDHLKVKKR

SEQ ID NO: 752 - protein, 27 aa, Artificial Sequence
  Chemically Synthesized
KKREEEAEQARKREEEREKEEEMAKKR

SEQ ID NO: 753 - protein, 32 aa, Artificial Sequence
  Chemically Synthesized
KKREEEEARKREEERKREEEEAKRREEERKKR

SEQ ID NO: 754 - protein, 44 aa, Artificial Sequence
  Chemically Synthesized
KKRRGRPRKYGPDSGEMSLGLNPGAPSFTVSQPSSGGDGGEKKR

SEQ ID NO: 755 - protein, 34 aa, Artificial Sequence
  Chemically Synthesized
KKRQDFVKDRRWIKREYDEFKVRINGLPEQIKKR

SEQ ID NO: 756 - protein, 44 aa, Artificial Sequence
  Chemically Synthesized
KKRKLETCDETWKREVVQAEEAKGGGEQKSESKKAKKQDKEKKR

SEQ ID NO: 757 - protein, 30 aa, Artificial Sequence
  Chemically Synthesized
KKRKPREWWKEEFCEELTRKKRKKKKKKKR

SEQ ID NO: 758 - protein, 37 aa, Artificial Sequence
  Chemically Synthesized
KKRGLSSISSIDSWFHRDDGASSVHDHNLNPTKRKKR

SEQ ID NO: 759 - protein, 45 aa, Artificial Sequence
  Chemically Synthesized
KKRKKKKKKKRGLSSISSIDSWFHRDDGASSVHDHNLNPTKRKKR

SEQ ID NO: 760 - protein, 27 aa, Artificial Sequence
  Chemically Synthesized
KKRRRATKKPYSRSIVGATLEVIQKKR

SEQ ID NO: 761 - protein, 37 aa, Artificial Sequence
  Chemically Synthesized
KKRVDSVVIGRSSKARRGHREPRKARSSGRLEAEKKR

SEQ ID NO: 762 - protein, 45 aa, Artificial Sequence
  Chemically Synthesized
KKRNKKFTISIKLFKKFYKNKLNENGEYKIESQILQNEKELNKKR

SEQ ID NO: 763 - protein, 39 aa, Artificial Sequence
  Chemically Synthesized
KKRIYLISDRNPSTGETGWYDKDKGRESKKGIWQIFKKR

SEQ ID NO: 764 - protein, 37 aa, Artificial Sequence
  Chemically Synthesized
KKRIAKAKSEAAEYQKLLASRLKEQREKRSESLAKKR

SEQ ID NO: 765 - protein, 27 aa, Artificial Sequence
  Chemically Synthesized
KKRRRTTKKPYSRSIVGATLEVIQKKR

SEQ ID NO: 766 - protein, 45 aa, Artificial Sequence
  Chemically Synthesized
KKRRAKVFKLAKGFKGAHNSLFRTAKQQVLKALRYSYVGRKRKKR

SEQ ID NO: 767 - protein, 37 aa, Artificial Sequence
  Chemically Synthesized
KKRIAKANSDAADYQKLLASRLKEQRDRRSESLAKKR

SEQ ID NO: 768 - protein, 29 aa, Artificial Sequence
  Chemically Synthesized
KKRFLDEMNKKKSCLKMVAQFFFQFKKKR

SEQ ID NO: 769 - protein, 43 aa, Artificial Sequence
  Chemically Synthesized
KKRTNLKKGPQSKLTKKKKERKVDKTRAIINEIERVLKEKKKR

SEQ ID NO: 770 - protein, 46 aa, Artificial Sequence
  Chemically Synthesized
KKRFLDEMNKKKSCLKMVAQFFFQFKKKRKNKKIDKAIKGINKKKR

SEQ ID NO: 771 - protein, 32 aa, Artificial Sequence
  Chemically Synthesized
KKRNKMQDLTNRANKARNEIERIRKEKKKKKR

SEQ ID NO: 772 - protein, 34 aa, Artificial Sequence
  Chemically Synthesized
KKRASVRKICQKCRLTRRRGRIRVICSNPRHKKR

SEQ ID NO: 773 - protein, 29 aa, Artificial Sequence
  Chemically Synthesized
KKRRTLQEWQIQPKKYLLEKHNIKVLKKR

SEQ ID NO: 774 - protein, 45 aa, Artificial Sequence
  Chemically Synthesized
KKRRAKIFKLAKGFKGAHKCLFRTAKQQVLKALRYSYVGRKRKKR

SEQ ID NO: 775 - protein, 46 aa, Artificial Sequence
  Chemically Synthesized
KKRLTAAQVLEHTWILNAKKAPNVSLGETVKARLKQFSVMNKLKKR

SEQ ID NO: 776 - protein, 29 aa, Artificial Sequence
  Chemically Synthesized
KKRLTLKHRIEIVMGIICMIVAGFQEKKR

SEQ ID NO: 777 - protein, 28 aa, Artificial Sequence
  Chemically Synthesized
KKRIDNFKKEALLKANPQIQANPQLKKR

SEQ ID NO: 778 - protein, 46 aa, Artificial Sequence
  Chemically Synthesized
KKRLSAAQVLEHSWIQNAKKAPNVSLGETVKARLKQFSVMNKLKKR

SEQ ID NO: 779 - protein, 28 aa, Artificial Sequence
  Chemically Synthesized
KKRRGRPRKYEANGAPLPSSSVPLVKKR

SEQ ID NO: 780 - protein, 36 aa, Artificial Sequence
  Chemically Synthesized
KKRGYNGKVIALIVALSTVISIMLVLLFLFMMYKKR

SEQ ID NO: 781 - protein, 27 aa, Artificial Sequence
  Chemically Synthesized
KKRDASFVQPDERTAQTFSTKNKEKKR

SEQ ID NO: 782 - protein, 33 aa, Artificial Sequence
  Chemically Synthesized
KKRKLEAEAEVVVVEAAAATSTDEATKSSKKKR

SEQ ID NO: 783 - protein, 46 aa, Artificial Sequence
  Chemically Synthesized
KKRSRATSTDKNKRARVNKRAQKNVEMSGDNNEGEEEEGETKLKKR

SEQ ID NO: 784 - protein, 27 aa, Artificial Sequence
  Chemically Synthesized
KKRVSDESDSDSDSGDRKRRRRSMKKR

SEQ ID NO: 785 - protein, 45 aa, Artificial Sequence
  Chemically Synthesized
KKRKRSKPLRPAPSRVLRSTSEKKNKAHNELLNDGAGVQPAEKKR

SEQ ID NO: 786 - protein, 26 aa, Artificial Sequence
  Chemically Synthesized
KKRKRSSKKDKHRRSKQRDKRHEKKR

SEQ ID NO: 787 - protein, 44 aa, Artificial Sequence
  Chemically Synthesized
KKRSMRDKRPKRKSRRSPDSLEDSNSGSEASLSDVNVEIGAKKR

SEQ ID NO: 788 - protein, 41 aa, Artificial Sequence
  Chemically Synthesized
KKRKSKKNKRHKKHSSRTVEETDESSTGSEDSREKRGSKKR

SEQ ID NO: 789 - protein, 40 aa, Artificial Sequence
  Chemically Synthesized
KKREEQLEKARLAMERKRKLHEKAAAKAVIRVKKEAEKKR

SEQ ID NO: 790 - protein, 34 aa, Artificial Sequence
  Chemically Synthesized
KKRLRMLAVLGVELVFMLAVILGVLLSAHTHKKR

SEQ ID NO: 791 - protein, 44 aa, Artificial Sequence
  Chemically Synthesized
KKRKGSETEGWENLPDDLSCSTASRSSNFRSHFSLEGYARLKKR

SEQ ID NO: 792 - protein, 41 aa, Artificial Sequence
  Chemically Synthesized
KKRVYKDKSRCYECGDEGHLSYECPKNQLGPRERPPPPKKR

SEQ ID NO: 793 - protein, 29 aa, Artificial Sequence
  Chemically Synthesized
KKRMEALNLPKLSQILNSTSVKISPMKKR

SEQ ID NO: 794 - protein, 30 aa, Artificial Sequence
  Chemically Synthesized
KKRSIPRTPEKKMVDVKRVHIQRRGVGKKR

SEQ ID NO: 795 - protein, 26 aa, Artificial Sequence
  Chemically Synthesized
KKRVKTQCVIKSSDKSDHDTLLKKKR

SEQ ID NO: 796 - protein, 27 aa, Artificial Sequence
  Chemically Synthesized
KKRVYRLVKASDVKSKEHVKNKSGKKR

SEQ ID NO: 797 - protein, 27 aa, Artificial Sequence
  Chemically Synthesized
KKRPGVSPGDRSGGKGRPTSRMGNKKR

SEQ ID NO: 798 - protein, 36 aa, Artificial Sequence
  Chemically Synthesized
KKRNTCSVSSQTRKVSLKISKINGVGVRCTPNSKKR

SEQ ID NO: 799 - protein, 37 aa, Artificial Sequence
  Chemically Synthesized
KKRQDKLEMSEIKQFFDRPIMKAAKELNVGLTVLKKR

SEQ ID NO: 800 - protein, 43 aa, Artificial Sequence
  Chemically Synthesized
KKRNLKKKRQDKLEMSEIKQFFDRPIMKAAKELNVGLTVLKKR

SEQ ID NO: 801 - protein, 29 aa, Artificial Sequence
  Chemically Synthesized
KKRKLYDAMKISQSRKRSGVEIIEQRKKR

SEQ ID NO: 802 - protein, 36 aa, Artificial Sequence
  Chemically Synthesized
KKRGYNSQVLALIVALSGVTVILLALLFFFVMYKKR

SEQ ID NO: 803 - protein, 39 aa, Artificial Sequence
  Chemically Synthesized
KKRQPEFRMLGKDHLSDQESVEVRVPDSIKKPIDSSKKR

SEQ ID NO: 804 - protein, 37 aa, Artificial Sequence
  Chemically Synthesized
KKRVAKAKSEAAEYQKLLASRLKEQRDRRSESLAKKR

SEQ ID NO: 805 - protein, 29 aa, Artificial Sequence
  Chemically Synthesized
KKRKEETVLLPSGVQGLGMGLPDMRSKKR

SEQ ID NO: 806 - protein, 39 aa, Artificial Sequence
  Chemically Synthesized
KKRVKKLKSKKLEAEEELNNVQEIDAHDIVMEQKSDKKR

SEQ ID NO: 807 - protein, 38 aa, Artificial Sequence
  Chemically Synthesized
KKRKKTPNGDPQRLGIDTLLPQCLRGAPAAARRKRKKR

SEQ ID NO: 808 - protein, 36 aa, Artificial Sequence
  Chemically Synthesized
KKRRAPPPPSPGLLGQDKVSEKASLSSQADLQKKKR

SEQ ID NO: 809 - protein, 39 aa, Artificial Sequence; identical to SEQ ID NO: 605
  Chemically Synthesized

SEQ ID NO: 810 - protein, 42 aa, Artificial Sequence
  Chemically Synthesized
KKRMRLEEENEGLRQRLIETELAKQVLQTELDRPREHSLKKR

SEQ ID NO: 811 - protein, 33 aa, Artificial Sequence
  Chemically Synthesized
KKRAKMGKLKDKFKTELESTSEILGFDVKTKKR

SEQ ID NO: 812 - protein, 45 aa, Artificial Sequence
  Chemically Synthesized
KKRKKLKSEGTTSEKKAASQQDAVTEGAMPAATGKDQPPSTGKKR

SEQ ID NO: 813 - protein, 33 aa, Artificial Sequence
  Chemically Synthesized
KKRKEEERKKKETDQKKEAAVSVQEESDLEKKR

SEQ ID NO: 814 - protein, 29 aa, Artificial Sequence
  Chemically Synthesized
KKRKKGEKQAPGEEKGRKRRRVKEDKKKR

SEQ ID NO: 815 - protein, 36 aa, Artificial Sequence
  Chemically Synthesized
KKRSFSGFGSPLDRLSAGSVEHRGKQRKAVDHSKKR

SEQ ID NO: 816 - protein, 36 aa, Artificial Sequence
  Chemically Synthesized
KKRSFSGFGSPLDRLSAGSVEHRGKQRRVVDHSKKR

SEQ ID NO: 817 - protein, 27 aa, Artificial Sequence
  Chemically Synthesized
KKRVGDSSALQTIHGKEMSKIARKKKR

SEQ ID NO: 818 - protein, 27 aa, Artificial Sequence
  Chemically Synthesized
KKRVGDSSALQTIHGKEMSKIARKKKR

SEQ ID NO: 819 - protein, 41 aa, Artificial Sequence; identical to SEQ ID NO: 587
  Chemically Synthesized

SEQ ID NO: 820 - protein, 39 aa, Artificial Sequence
  Chemically Synthesized
KKRDKVEASSLPEARAGKRERCSAEDEDCLPPRPKAKKR

SEQ ID NO: 821 - protein, 45 aa, Artificial Sequence
  Chemically Synthesized
KKRRKKSSGERLKEEKPKKSKTAAASKTKGKSKLNTITPVVGKKR

SEQ ID NO: 822 - protein, 39 aa, Artificial Sequence
  Chemically Synthesized
KKRKQKEGEEAATTEKSLGDELLGHTDRSFRDSRKKKKR

SEQ ID NO: 823 - protein, 44 aa, Artificial Sequence
  Chemically Synthesized
KKRQKAERQGTAIGSEEEEAAGESGPRELSTEQSDQPSRKKKKR

SEQ ID NO: 824 - protein, 46 aa, Artificial Sequence
  Chemically Synthesized
KKRRKQRHEEDGEMGVCDEGGRDVTSRPKAVNSGGDKDPRRSSKKR

SEQ ID NO: 825 - protein, 33 aa, Artificial Sequence
  Chemically Synthesized
KKRTKMGKLKDKFKTELESTSEIIGFDVKTKKR

SEQ ID NO: 826 - protein, 45 aa, Artificial Sequence
  Chemically Synthesized
KKREQTASAPATPLVSKHRPSFTRSNTISKPYISNTLPSDAPKKR

SEQ ID NO: 827 - protein, 27 aa, Artificial Sequence
  Chemically Synthesized
KKRKERFGIVTSSAGTGTTEDTEAKKR

SEQ ID NO: 828 - protein, 42 aa, Artificial Sequence
  Chemically Synthesized
KKRPKGYVQTRTGRTSLKNSSETVGQKRKKAEETKGLPPKKR

SEQ ID NO: 829 - protein, 33 aa, Artificial Sequence
  Chemically Synthesized
KKRQRLIDVQDELIRLEPQLKQLQTKYDDLKKR

SEQ ID NO: 830 - protein, 45 aa, Artificial Sequence
  Chemically Synthesized
KKRKMYEDKPLSSESLSESDCGEVQAKKKKSGEERERTTDKAKKR

SEQ ID NO: 831 - protein, 31 aa, Artificial Sequence
  Chemically Synthesized
KKRVKQFKNKPQGGKGPKDKFQKANKFNKKR

SEQ ID NO: 832 - protein, 36 aa, Artificial Sequence
  Chemically Synthesized
KKRQTCEEDLDTQDEEDKDDLTKKERKVRKKDKKKR

SEQ ID NO: 833 - protein, 44 aa, Artificial Sequence
  Chemically Synthesized
KKRQQYCEEVLDVSNKDDGRTWEAEDGGERSQPHPKARAKKKKR

SEQ ID NO: 834 - protein, 46 aa, Artificial Sequence
  Chemically Synthesized
KKRRRRHHEEEEEMGVCDEGGRDVTGGPKAVNSGADTDPWRSSKKR

SEQ ID NO: 835 - protein, 46 aa, Artificial Sequence
  Chemically Synthesized
KKRSSIWQFFSRLFSSSSNATKKPEPPVNLKYNAPTSHVTPSVKKR

SEQ ID NO: 836 - protein, 36 aa, Artificial Sequence
  Chemically Synthesized
KKRRAPPPPSPKLLGQDKVSEKASLSSQADLQKKKR

SEQ ID NO: 837 - protein, 32 aa, Artificial Sequence
  Chemically Synthesized
KKRKALEFVTNPDIAAKKKLKKHKNKSEAKKR

SEQ ID NO: 838 - protein, 39 aa, Artificial Sequence
  Chemically Synthesized
KKRDKVETGGLPESKAGKRERSSAEDEDCLPPRPKLKKR

SEQ ID NO: 839 - protein, 41 aa, Artificial Sequence
  Chemically Synthesized
KKRVIASPQAPASKKLKEELPVIPKGKPKSGRVWKDRSKKR

SEQ ID NO: 840 - protein, 40 aa, Artificial Sequence
  Chemically Synthesized
KKRVEAEREMVRMVRAATLIQAMWKGYLVRSMLRSRKKKR

SEQ ID NO: 841 - protein, 27 aa, Artificial Sequence
  Chemically Synthesized
KKRSLKLTEGKSLVDGNGEKPVMKKKR

SEQ ID NO: 842 - protein, 28 aa, Artificial Sequence
  Chemically Synthesized
KKRRRRPPKGEEGSEEEETENGPKPKKR

SEQ ID NO: 843 - protein, 37 aa, Artificial Sequence
  Chemically Synthesized
KKRGGGGGRRSKKGGEFDEFVNDDTDDDLPVSKKKKR

SEQ ID NO: 844 - protein, 28 aa, Artificial Sequence
  Chemically Synthesized
KKRRREPQTPAQETLESEWPQKAKKKKR

SEQ ID NO: 845 - protein, 33 aa, Artificial Sequence; identical to SEQ ID NO: 813
  Chemically Synthesized

SEQ ID NO: 846 - protein, 36 aa, Artificial Sequence
  Chemically Synthesized
KKRSAGIIEDVGGEVQNMLEKFGADINKALLAKKKR

SEQ ID NO: 847 - protein, 45 aa, Artificial Sequence; identical to SEQ ID NO: 580
  Chemically Synthesized

SEQ ID NO: 848 - protein, 31 aa, Artificial Sequence
  Chemically Synthesized
KKRAATTVLQELKKLPPLPVIEKPKLFFKKR

SEQ ID NO: 849 - protein, 29 aa, Artificial Sequence
  Chemically Synthesized
KKRKKGQEAGHEAGGEDAAEANGAPEKKR

SEQ ID NO: 850 - protein, 45 aa, Artificial Sequence; identical to SEQ ID NO: 580
  Chemically Synthesized

SEQ ID NO: 851 - protein, 34 aa, Artificial Sequence
  Chemically Synthesized
KKRKRYFMQEEMEAKTMEPVAELPVPSATSSKKR

SEQ ID NO: 852 - protein, 37 aa, Artificial Sequence
  Chemically Synthesized
KKRKKSKGTETSQVEHTEPVAQTEPPEGTFLFPTKKR

SEQ ID NO: 853 - protein, 43 aa, Artificial Sequence
  Chemically Synthesized
KKRKRQKEADGTEEVDGIVADSQPQVIVEAQEETILLSPTKKR

SEQ ID NO: 854 - protein, 31 aa, Artificial Sequence
  Chemically Synthesized
KKRHQEDQDPIFQASDSSGYQSDHNKKKKKR

SEQ ID NO: 855 - protein, 45 aa, Artificial Sequence
  Chemically Synthesized
KKRHQEDQDPIFQASDSSGYQSDHNKKKKKRKHSEEANFESPKKR

SEQ ID NO: 856 - protein, 45 aa, Artificial Sequence
  Chemically Synthesized
KKRRTPLLSFLSKVSWKLRLQKRELLKNALFVLAERARDPNAKKR

SEQ ID NO: 857 - protein, 46 aa, Artificial Sequence
  Chemically Synthesized
KKRKKLKSEGTTPEKNAASQQDAVTEGAMPAATGKDQPPSTGKKKR

SEQ ID NO: 858 - protein, 39 aa, Artificial Sequence; identical to SEQ ID NO: 605
  Chemically Synthesized

SEQ ID NO: 859 - protein, 26 aa, Artificial Sequence
  Chemically Synthesized
KKRLRNKRSRSRESSSRPRARKDKKR

SEQ ID NO: 860 - protein, 31 aa, Artificial Sequence
  Chemically Synthesized
KKRREKAIGEGRVVYIRNLSGDMSSRELKKR

SEQ ID NO: 861 - protein, 35 aa, Artificial Sequence
  Chemically Synthesized
KKRRRSPSYSPSPVKKKKKKSSKKHKRHRSFSKKR

SEQ ID NO: 862 - protein, 31 aa, Artificial Sequence; identical to SEQ ID NO: 623
  Chemically Synthesized

SEQ ID NO: 863 - protein, 31 aa, Artificial Sequence
  Chemically Synthesized
KKRGRTPKILIPHPTSTPSKSAEPLKFPKKR

SEQ ID NO: 864 - protein, 46 aa, Artificial Sequence
  Chemically Synthesized
KKRLDGIEEVEREINRGRSCKGSEFTCPEDNKIRELTLEIERLKKR

SEQ ID NO: 865 - protein, 38 aa, Artificial Sequence
  Chemically Synthesized
KKRFGGVQELLSQQKKSGEVAVLKRDGRYIYYLITKKR

SEQ ID NO: 866 - protein, 37 aa, Artificial Sequence
  Chemically Synthesized
KKRLRRMTPFWRGVSLRPIGASCRDDSECITRLCKKR

SEQ ID NO: 867 - protein, 46 aa, Artificial Sequence
  Chemically Synthesized
KKRLDGIEEVEREINRGRLCKGSEFTCPEDNKIRELTLEIERLKKR

SEQ ID NO: 868 - protein, 45 aa, Artificial Sequence
  Chemically Synthesized
KKRKMYEDKPLSSESLSESDCGEVQAKRKKSGEERERTTDKAKKR

SEQ ID NO: 869 - protein, 32 aa, Artificial Sequence
  Chemically Synthesized
KKRKREDAGDDDDKEGAIGVRNKVAGGKMKKR

SEQ ID NO: 870 - protein, 45 aa, Artificial Sequence
  Chemically Synthesized
KKRDRAELQPGGPSEDECSDASVEAAEDCVQTPDIQDDVPKPKKR

SEQ ID NO: 871 - protein, 27 aa, Artificial Sequence
  Chemically Synthesized
KKRKERFGIVTSSAGTGTTEDTEAKKR

SEQ ID NO: 872 - protein, 40 aa, Artificial Sequence
  Chemically Synthesized
KKRVEAEREMVRMVRAATLIQAVWKGYLVRSILRSKKKKR

SEQ ID NO: 873 - protein, 35 aa, Artificial Sequence
  Chemically Synthesized
KKRKLKADDTDNVYYNANRKNSKRLNVEVFIPKKR

SEQ ID NO: 874 - protein, 45 aa, Artificial Sequence; identical to SEQ ID NO: 821
  Chemically Synthesized

SEQ ID NO: 875 - protein, 39 aa, Artificial Sequence
  Chemically Synthesized
KKRKNISQDTFGTTFGRIHMQKQDLSKLQTRKMKGLKKR

SEQ ID NO: 876 - protein, 43 aa, Artificial Sequence
  Chemically Synthesized
KKRVIASPQAPASKKLKEKEELPVIPKGKPKSGRVWKDRSKKR

SEQ ID NO: 877 - protein, 37 aa, Artificial Sequence
  Chemically Synthesized
KKRQRSESHSASERSSSAESERSYKKSKKHKKKSKKR

SEQ ID NO: 878 - protein, 32 aa, Artificial Sequence
  Chemically Synthesized
KKRQLLDSDEEEDDEGRRQAVSGTPRVHRKKR

SEQ ID NO: 879 - protein, 39 aa, Artificial Sequence; identical to SEQ ID NO: 629
  Chemically Synthesized

SEQ ID NO: 880 - protein, 32 aa, Artificial Sequence
  Chemically Synthesized
KKREAAEKEKRARIAKERAEKERLERQQEKKR

SEQ ID NO: 881 - protein, 41 aa, Artificial Sequence
  Chemically Synthesized
KKRGRKPGSVVAAAAAEAKKKAVKESSIRSVHETVLPIKKR

SEQ ID NO: 882 - protein, 46 aa, Artificial Sequence
  Chemically Synthesized
KKRKRCGVCVPCLRKEPCGACYNCVNRSTSHQICKMRKCEQLKKKR

SEQ ID NO: 883 - protein, 46 aa, Artificial Sequence; identical to SEQ ID NO: 882
  Chemically Synthesized

SEQ ID NO: 884 - protein, 31 aa, Artificial Sequence
  Chemically Synthesized
KKRKRSSTRKASDETDSESETDSRESFKKKR

SEQ ID NO: 885 - protein, 34 aa, Artificial Sequence
  Chemically Synthesized
KKRKKKHPSKKERKGTIRDYECAETKQKKKHKKR

SEQ ID NO: 886 - protein, 26 aa, Artificial Sequence
  Chemically Synthesized
KKRRREHGQLWFPEGFIPKEPSKKKR

SEQ ID NO: 887 - protein, 32 aa, Artificial Sequence
  Chemically Synthesized
KKRMAAELYPVSDHATLQKSGAVMLSLPEKKR

SEQ ID NO: 888 - protein, 36 aa, Artificial Sequence
  Chemically Synthesized
KKRRAPAPPPAPTQTLPPTSQISLGSPSSHNLLKKR

SEQ ID NO: 889 - protein, 31 aa, Artificial Sequence
  Chemically Synthesized
KKRKHVKNEEDETNHEKTKQHLKEEKRRKKR

SEQ ID NO: 890 - protein, 46 aa, Artificial Sequence
  Chemically Synthesized
KKRSSLFSPRKSRKNGNAAAESGRETGKHKSLWKTVFSVYKKDKKR

SEQ ID NO: 891 - protein, 46 aa, Artificial Sequence
  Chemically Synthesized
KKRKRCGVCVPCLRKEPCGTCYNCVNRSTSHQICKMRKCEQLKKKR

SEQ ID NO: 892 - protein, 27 aa, Artificial Sequence
  Chemically Synthesized
KKRGLKPSGKRELAHPPSSEPPLPKKR

SEQ ID NO: 893 - protein, 33 aa, Artificial Sequence
  Chemically Synthesized
KKRKRHRSASRKGRHSGSSSRRKRKEDKKHKKR

SEQ ID NO: 894 - protein, 35 aa, Artificial Sequence
  Chemically Synthesized
KKRREERRKILEEEEQKKKQEEAERKIREEEEKKR

SEQ ID NO: 895 - protein, 35 aa, Artificial Sequence; identical to SEQ ID NO: 894
  Chemically Synthesized

SEQ ID NO: 896 - protein, 26 aa, Artificial Sequence
  Chemically Synthesized
KKRRREHGQLWFPDGFIPKEPSKKKR

SEQ ID NO: 897 - protein, 27 aa, Artificial Sequence
  Chemically Synthesized
KKRRRRDEDSDTEGEQQTQPDGEAKKR

SEQ ID NO: 898 - protein, 31 aa, Artificial Sequence
  Chemically Synthesized
KKRRRRDEDSDTEGEQQTQPDGEAKKRRKKR

SEQ ID NO: 899 - protein, 34 aa, Artificial Sequence
  Chemically Synthesized
KKRECAANGVDYERAKLLEISAEDAERWERKKKR

SEQ ID NO: 900 - protein, 39 aa, Artificial Sequence
  Chemically Synthesized
KKRDEERKRELEERRKKEQEEQLRRLREEEREEDEKKKR

SEQ ID NO: 901 - protein, 41 aa, Artificial Sequence
  Chemically Synthesized
KKRSSSRCRSGSDSPARKHSTLAKYRAEVPDRRKKERRKKR

SEQ ID NO: 902 - protein, 26 aa, Artificial Sequence
  Chemically Synthesized
KKRRKRPQKAAGSDDDEEQTPQSKKR

SEQ ID NO: 903 - protein, 30 aa, Artificial Sequence
  Chemically Synthesized
KKRKKGGSSSGEQGEGGDEGEGGEKKKKKR

SEQ ID NO: 904 - protein, 26 aa, Artificial Sequence
  Chemically Synthesized
KKRSYKDLLREEEEIAEQVRKSSKKR

SEQ ID NO: 905 - protein, 45 aa, Artificial Sequence
  Chemically Synthesized
KKRKVEKQIPDATKKKKATVKKECFITQERSEEKPDNESNKNKKR

SEQ ID NO: 906 - protein, 27 aa, Artificial Sequence
  Chemically Synthesized
KKRHDSPDLSPQEQQTTPDLSLQRKKR

SEQ ID NO: 907 - protein, 30 aa, Artificial Sequence
  Chemically Synthesized
KKRKFEKPPDPSVRKRLKLVKEEKLLRKKR

SEQ ID NO: 908 - protein, 27 aa, Artificial Sequence
  Chemically Synthesized
KKRRKRPQKGGDGSDDDEDQAPQPKKR

SEQ ID NO: 909 - protein, 32 aa, Artificial Sequence
  Chemically Synthesized
KKRRKRPQKGGDGSDDDEDQAPQPKKRQPKKR

SEQ ID NO: 910 - protein, 33 aa, Artificial Sequence
  Chemically Synthesized
KKRKKGGGSSGSGGEQGEGGEEGEGGEKKKKKR

SEQ ID NO: 911 - protein, 34 aa, Artificial Sequence
  Chemically Synthesized
KKRPEVLTIHENSRQENYETETVQVKQAKPNKKR

SEQ ID NO: 912 - protein, 39 aa, Artificial Sequence
  Chemically Synthesized
KKRKHKLQETKGKIKKSESVQNTDPTEEADSSVKKKKKR

SEQ ID NO: 913 - protein, 44 aa, Artificial Sequence
  Chemically Synthesized
KKRKNRKKPTILEGKETETPVEKTPEGASGEGKKNKNKKKNKKR

SEQ ID NO: 914 - protein, 39 aa, Artificial Sequence
  Chemically Synthesized
KKRKKNFMMMRHSQNVRTKGKRSFREKQIALRDSLLKKR

SEQ ID NO: 915 - protein, 31 aa, Artificial Sequence
  Chemically Synthesized
KKRRARSRSNSRSKHRHRSRSRSKSREKKKR

SEQ ID NO: 916 - protein, 42 aa, Artificial Sequence
  Chemically Synthesized
KKRRKTCKTSTTDSRSSRLEEDPVGQDIPDESNAQSSPKKKR

SEQ ID NO: 917 - protein, 39 aa, Artificial Sequence
  Chemically Synthesized
KKRDEERRRELEERRKKEQEEQLRRLREEEREEEERKKR

SEQ ID NO: 918 - protein, 26 aa, Artificial Sequence
  Chemically Synthesized
KKRSYKDLLREEEEIAEQVRKSSKKR

SEQ ID NO: 919 - protein, 34 aa, Artificial Sequence
  Chemically Synthesized
KKREREQSETASTAPVEPFTLPKPVEVVVEEKKR

SEQ ID NO: 920 - protein, 31 aa, Artificial Sequence
  Chemically Synthesized
KKRAALSILQELKKLPVLPVVEKPKVHYKKR

SEQ ID NO: 921 - protein, 26 aa, Artificial Sequence
  Chemically Synthesized
KKRRRREGESDTEEEQTQPDGEGKKR

SEQ ID NO: 922 - protein, 30 aa, Artificial Sequence
  Chemically Synthesized
KKRRRREGESDTEEEQTQPDGEGKKRRKKR

SEQ ID NO: 923 - protein, 31 aa, Artificial Sequence
  Chemically Synthesized
KKRRPRSRSRSRSKHRHRSKSRSKSREKKKR

SEQ ID NO: 924 - protein, 34 aa, Artificial Sequence
  Chemically Synthesized
KKRECAANGVDFERAKLLEISAEDAERWERKKKR

SEQ ID NO: 925 - protein, 46 aa, Artificial Sequence
  Chemically Synthesized
KKRKELDDVSEDVETLEMVFESRDLDWEEQTANGDQEAQSNKRKKR

SEQ ID NO: 926 - protein, 30 aa, Artificial Sequence
  Chemically Synthesized
KKRAQRILIFLLEFLLDFCTGEDSVDGKKR

SEQ ID NO: 927 - protein, 41 aa, Artificial Sequence
  Chemically Synthesized
KKRAPKLRATCSSSGLDNLYNAVANIAKASSLRVEVIHKKR

SEQ ID NO: 928 - protein, 41 aa, Artificial Sequence; identical to SEQ ID NO: 927
  Chemically Synthesized

SEQ ID NO: 929 - protein, 45 aa, Artificial Sequence
  Chemically Synthesized
KKRRYFMDIWMKDSSGQEFFIEIKPKKETQPPVKPAHLTTAAKKR

SEQ ID NO: 930 - protein, 35 aa, Artificial Sequence
  Chemically Synthesized
KKREILIRSLQMIKRQAVKSAANQRNPMGGSWKKR

SEQ ID NO: 931 - protein, 37 aa, Artificial Sequence
  Chemically Synthesized
KKRPCKVKRKLFGSENIRPNKKIPLASDVDNELEKKR

SEQ ID NO: 932 - protein, 26 aa, Artificial Sequence
  Chemically Synthesized
KKRMDDTEKRKLQEDRRNEKQDLKKR

SEQ ID NO: 933 - protein, 28 aa, Artificial Sequence
  Chemically Synthesized
KKRYRSPSSDRSLSRDRSSSRDRSYKKR

SEQ ID NO: 934 - protein, 41 aa, Artificial Sequence
  Chemically Synthesized
KKRRPGRGDTSATSDGGTSPKRPLRDSWNLLPQRRAAHKKR

SEQ ID NO: 935 - protein, 26 aa, Artificial Sequence
  Chemically Synthesized
KKRVVGLESCSNVLKTRLMRFALKKR
